United States Patent Application Publication US 2024/0226191 A1 - sequence listing, part 7

SEQ ID NO: 28 - DNA, 3193159 bp, Mediterraneibacter faecis (residues 1-1,596,580 of 3,193,159)
ttcctcgtctttctgcggttaacattcctatattgtaatctctgattgctctttgccttgtctcgtattctaatctcttcttttcatctgcgcttaatttatccaatacgtcatatgcttcttccaattcagaatttttctttgccatttcttcaaaatcctttctggtttttcctccaagaaagcgcatccactgcaacaggcttgtctcatttttctcttccggtggaagttttgacaattctaagatatgcatctccataagatctgtatactcttttcctgtctttgcatcacagaatgcaattctccgataacactctttatcatctagaaaatgatcgtatgcaagaatgctcacatggatacacttcttcaagcaatcgtatccctcgccttcttttatttcacttgtatacatcttacttagataataaacagaacgatttgcccagcaatcaaatgcttctacctgcatctcaaaatcaatctgttctccattcttcagtttcacccggacatctaaaatcccatacttatcatctttcgattcttttctgagaatcgtaggcataagttccgtgttctctaccgcaccggatggaacgttcaatagtgctgcgataatattcttgcggatgttatcattctgcatcaattccttgaaacagaaatctaccgttggaagcatgataaagtcttcctgctcctctttcgattctttacaatgtgatgataccctcttagttgatacacttttcttgttttctttcatagaattctcctctcttctgtgcaacgaatgattgcctgaagaagaggattctaaagttatatttatcttaacacaagatagttttctatggaagtaactatccccttaaaatcagatatttgagaaacttactccatcacataatcttcaaacaatattcatctttttgggttgtcatcggattatctgctcgaaaatctgagcttattgaataattaccgatttggttcatagatctttttgcagttcatcagaatgatgactgcgtggtattagattagcatgagaattctattattgcaagctgaatttttgtaagcatctcaaaacatgacacactagtattacagcagtttttcttctatactagccgcatcatcaatggaggcacttaccattctgattccgtttcaccagatgtgtaccaacttcttacattggcatattccaaaaaataccgtcctagccaatcgcagactatccctcagttgccccttggaaacagttcaataaaaccgtctctaaagaattcaccgttcgcgtagcagctcaccaacaaagtgttaagtcttatggtcataacccgctgtcgcgcttctccgtttttcaaagtgctgacctttattgtcataacccgtacgcaaactcactttgttaaaactgtacaactacatagcgcttctttgttgcaacatgaacaatcatcccccctcactacctctaattcttcggaaaaatgaaggtatcatgtcactaccttgctctgcaatagaacaggctcgcagtaggggtattttgcatgagttttatacgccaccgtagaccatcaaatcgccactgaaagtttgaggtagacattcgtcggagccgcaatcgacaaaccaacataaccggtaccagcaactgcaattctatactcctttttcatgtcctaatatcctcctaaactttatttcaattctttgttttttcttcatgtagccatacgttcaatatcaataacacctgcagcttcccctcccggttccactgcagatcatcattcttatatcattttccttatctcttctatctaatccatcacttggatccactgcccttaagcacaactccgacagtcttaagcagcattttgatatccattccgatattccagttcttgacatattccatatcaagctttacaacttcctcaaagtcagtgatatcacttcttccactcacctgccacattccggtcagtcccggcttcacggcaagtcttccgcggtgatatggctcatactgtttccactcatctactgttggtggacgggttcctacgagactcatatctcctttgagtacattccagaactgcgggaattcatccaaagatgtcttacggataaaccagccaagtccatgcttgcttccatccgatccgcttccgatgattcttgggtcattctccatcttgaacatgagccccttcatctcgttctgtttcatcagttctttcttgcgttcctctgcatccatatacatgcttcggaatttatagattttaaataattttccgttttttcctactctcatctgagagaagaagattggccccggtgaagcaatatagattgccggagcaaggaatattgtaatgatacctgtcagaatcattccaacgattccgccacagatgtccatcgttctcttcatcatggcctgccgtgaggaaatcactctgacgctggaagtcaggactgtatatccacccatgcggttaataaactgatttcctgcccatcctgctctgtcttctagacattcgtgaactgtaattcccatgttcacgcatgtttcaaacaaatcttccggtatcaatgttttcttcttaattccaacaagaagagcatcaacccatcttgtctgtatgtattcagttactgtatcaatcttacttacaaccggaattccttcgatcatttcattttcttccggttcgcggtctgcaagtacgattccgacaatatcgaattcattaaatacattctgttccacccgtcttaacatggaatctatttcatcacttgttgaaacaaggagtatatttatttttgaatagagcatattgccatgtttcagcaaatatttcttccatacgattcgcaccgcataaagcagaaccactgccattggaatgaatgagctgatcacaagacgcgaggtcatgcttccctgtttgctcataaagagatatacgatcacaagcacactcacgataaacacatgcttcaatacattcttaaactctacaaaatatcctcttctcatgatcccatgatatggctctgtaaagaaagctgtacaaatgtctatcagtataataataatcccgatattcagatataatccgttatgatacagatcacttgttcccatgcgcaatacataactgcttatataagccagctgtaatgcaacaagatctagtataatgaaatcccagtgcttcaaccagccgttactgttcttcctatacattcgcgtacacccttttcccctgataatcttctgtctgactgcataacaaaacatctgattttatttatcttaaatgctttgtctgttttttctctgtaaactgaaatatgcagcggatattctccactgcatatccggctattcctgtttgcttttaccgtagtagtatgaattatacttactatagtatttttctttcttcatatccactttattcagtactgcaccgagaagcttacatccactctttgtaagctgttcttttgctttcattgcatctcttctgcttactgcttcgctctcgattacgaggattgctccatcacattgttttgctgcgattgctgcatcactcatactgatgatcggtggtgtatcaatcaaaatataatcataaacttttcttgtctcttcgatcaatctgccaaaacgtccctgctccagaagctctgacgggttcggagcatacggacctgaaaagataatctcaagattacggtaattggtagaataaattatttcttccaaagcaacctgtccacttaaatactgtgacagtccattggtcttctgtttgatctggtaacgtttgatataactggacttacgaatatctgcatctatgatcagaactctctttcccatctttccaatctctactgcaagctggaaagccacatcactttttccttcatttggataacagcttgtgagaacaatactctttgtctctacaccactgaactgcatatttgtacggagggttttaatagcctcttcatagaagacatcttcttttctggaatctgtcaatataactctctgaattgccatttattttttcctccttttcttctttttcttcgatgttgtcttgcttgaattgcgaggtccttttcctgtaatgtagtcttttctatccggaatacttgccagtgttgtcagaccgaggtagttctcgatatcttcctctgacttgattgtatcatccatcagtgtgagaaggataataatacctgcggaaagaatcagaccagccagtgctccgatcatcacattcttctttgtactcggacttgtctggattgtcggcacttcaccttcttcaataactttcggtggtgttacttccatcttgtctccgataaagtcagctgatgtcttcgccagcgtgtcagcaatcttctttgccatctttggatctttgtctattgctgtaatggaaagaatacgtgtatcacttggattctctattgtgatacattccatcaactctttatatgtcatatccagattcagttcatctactacgtcctgcaatactgtacggcttgtgatcaggatgttgtagtctttcgtcagctgactaccgatctgcagatcagccagtgaagaaagtgttgtttcctttgtgagaacaagcattgtagatgttgcgctgtaaacaggtgtcatcaaaagctttgttgctgctccggcaatcactgctcctgccagtacggctgcaaggattaccaaaacacgctttttcaatgcgtagtatagttctctgaggtcaatctcgacctcgtcgtcatcatgcgtctttcccatctttgctcccctttattttattattttgttttctgtaatgcgaagtgcattctctcttgttatctgtctgaggtaagtactgtctaaatgcttcctcatccaacccattggctcttttgtatcaggcattctgctcccgatattgtgcatatcagttcccataaaatggatattcctttttttcagattatccttacaccagcgcgctgttgcatcatgccagcctccactgacggatctgtaattcatttggatcaatgcttccagatcgatcagttcttccacacgcttaccttttctaaggcaacgatacctctccgcatgagcaactaccggagtgtatcctgctcttgacagattcctcaccgctgtacatatctctgaataaggcactgacggcataaactcaaccagtacgtaattactgtctgccaacgtaagcagttttccctcttcaagcagtcgtataacactattagaataaaaaatctcctgacctgtccagattcgaattggtcttttgcacttcacctttccctctggtccttgcaccggacgatttgcacggctcatcagctcatcccgaagccgtctcagcttctccggatctctgttcggaaacgctttggaataatgtgaagttgcaaacacatctgtgattccctgtcttctcgccatagaaagcatatgaagactttctttcatcgaagacgctccatcatcaactccaggcaagatatggctatgtatatcaatcatctttaactcatccttttacacaatgaaagagacacctgggataaaaaatctgtcctgccgtgcctccttgttccgtcgtatcttattgcctttaatactcaattaatgatatttcatttttcttttactgtcaagatattttcatgtatatttttatgaaccttgtaacattttgtaacattatagtgatttctcgtttatttcttcattttgggttcaaaaatcaatgaagccaggtatccaaaaataagtgctgcgctgattccggcggcacttgccttgaaccctcccagaaagattccgaggaatccgtttttatcaacagcttccttcacacctttccacaggacatttccgaatcccagaagtggaacgcttgcgcctgctcctgaaaattttacaaatggttcgtatgctccaataaatccaagcactgcgcctgtacagacgagtaataccataacccgtcccggcatcagctttgttctgtccagaagaatctgcactgcagcgcagatgagacctccgattaaaaatgcttttatataatccatttttctattccttttctttttttaacacacacttagcacattttttacttcttcctattataatagggcttttcaacagtgttcgatcataatcgcatgcgcaattccaggcacacttgctccttcattgaagctgaccgttgacatcaatgcaccggtcggcacaaagagtatccttctccattctccgttctcaatctttggcagaatataagaagccagtgttgacgctgcgcatccacagccgcttccgccggcatgtgtatcctgtgtttcctgatcaaagatagtcattccacaatccatatgcttttttctgatatcatatcctctgcttttcattaggtcaaaaagtatggattgaccaatatatccaagatcacctgttatgacctgatcgtaatcttcctgtgtacgtccaagatcctgaaaattacggtagatggtatcggttgcagccggagccatacatgcccccatgttctgtgaatccttcaggccaaagtccacaatcttccctatcgtaacgccggtgatccgaacatgccggaactgggattttctttgatgctgcttatcggaatgtattttattcagatggcttcctacgaggaaagccccgctggctgtcacggtccagtgtgcggaaagtggtctctggttcgcatatcctaacggaaatcgaaattctttctctgcacttccgaaatggctggatgttactgccagcatgtaatctccgtatcctgctgccacactcattgctgctaatgccagtgcttctcctgatgtggaacatgcgccatacagaccgaagatgggaatctgcagatcttcaacgcccatagaagttgcgatcccttgtctgagaagatctcctccaaagagataacgcacagacttcggatccacatgcgactttcccagtgccagtacgcaggcttccttctgcatattgctttcggcttcctcccaggtctctgctccaaacaggtcatcctcatttgtcagatcaaagcattttccaagcggcccctgcgcttctttgcttcctgccacagatgcagcgcttagaagataaggtgcttttgtgaatacaatgctctgtgccccacgaagctgggacagatgaaaaggaccgcactccgactcaattgcccggttcttgtttcccgtatcattcatatcatttcctcatttctgatgcttcattatttatttttaaggatattattttcatttttgtgaaaaactatgtgtagaatttaaaaacaaaaagaagggattttcatttatggacaaaatagaacaattgaagcaacagaagcaatacgaagcctatgtcaaaaagaaaacaccacagcacaatgtgtggttcaacatgatgaaggcgttcttccttggtggaacaatctgcctgattggacaatgtatttatcatttctgtgaattgaaaaaactttccccggatgactgcagcagctggacttctattctgctcattcttctgagtatccttctcaccggtaccggaatttatccactgcttgccaaatggggcggtgccggtgcacttgttccgattaccggctttgccaactctgttgctgcacctgcaattgaatataagaaggaggggcaggtttttggtattggttgtaagatcttcacgattgccgggcctgtgatcttgtatggaattgtgacaagctgggcgcttggagttgtatattgggtatggacgttgatgtgaaacaagaaatgtgttagataaatgtattaggaagccgctattcacggcttcctaatctttctttaaaatctgtgtaattaaatgaagttagctgctgcatggttctgtcagcatgtctgatccagatatccggtaatggcatcccattaaatgtattgtttttgcaagtcgtataaatcgccatatctccaaacagaagaagatctccgtattccggtaatttgctgaatttatagtctccaatcacatcccctgacaggcaggttggacctcctaaccggactgtaatcccactatctgttgtctcatccgatgctccaagaagcggtgggcgataaggcatttccagtacatccggcatatggcaggcggcgctggcatctacgattgcaatctgtgtgtctccatttttcagaacatccagcacactggtaagaagaaatcctgcattcaatgcccaggcttctcccggttccagataaacctcaaccttccattcttcctgtgcctttcgaatgcattgctccagtcgcccaatatcatatcccggtcttgtaatatgatgaccaccgccaaaattaatccatttcactttggtgatcaaatcgccaaactgtttctttacggaagcaagggttgtctccagatcatccgagtcctgctcacagagagtatggaaatgaaccccatccaaaagttccattaactccggattcttcacaattgcttcatcccactgtactcttgttgtacccatgcggcttcccggtgcacaagggtcataaatctcatgtccctcctgggtcgagcattccggattgattcgaagtcccacgctttttcctgcctctttcgccattcttccaaagcgaagaagctgggacggagaattaaatacaatatgatcggcataccgaagaagttcctcgaattcatccgcccggtaacctgcacagaatacatgaacttcttttccaggcatttcctctgcccctaatcttgcctcatacaatccactggcctctgtacccgccagatacggttcaaaaaaaggataacaatcataattactgaatgctttctgtgccagaagcatcttacatcctgtccgttctgctactccaccgagcagttttgcgttttctataagtgctttttcatccaatatataacaaggtgttttgatatgctcaaattccggcggaataattccgccggtggctgtaaatggtgctcttttatctaatctttccatcagtctaccaacttcggatcatgattttcactgcgtggcagaccataacggtcaagtgcgtccaggaacggatccggatcaaattcctctacggtatatacacccggtctgatccattttccagtcagcatcatcaatgctccgcacattgccggaacacctgttgtataactgattgcctggcttccaacctcatggtagcattcctgatgatcgcatacgttatagatatagtaagtcttctcttttccatcttttacaccggtaaaaatacagccgatatttgtttttccttttgtgcgtggaccaagacttgccggatccggaagaagttctttcaggaactggatcggaacgatttcctgtccattgtactggatcggtgttgtagaaagcattcccacatcctcaagacaacgcatatgatccagatagctttgtccaaaagtcataaagaaacgaatacgtttcacacctggaattgtttttgcaagagactctatttcctcatggtgaagcagatacatgtccttgtctccgacctgatcaaagttgtattctctcttaatatccatcggtgggatttctacccaatgtccattttcccagtaacttcccggtgcacttacttcacgaagattgatttccggattaaagtttgtcgcaaatgcatatccatgatcaccgccattgcagtccagaatgtcaatggtatcaatctgatcaaattcatgttttaatgcatatgcacaatatgcctgtgtgacacccgggtcaaatccgcatccaagcagtgctgtaagacctgcatcttcaaattttttgcggtatgcccactgccaggaataatcaaaatatgctgaaaatccttcttctttacagcgtttttcgtaaattgcacgccacttcggatcatccgtatcttccggctcgtagtttgctgtatccatatagtttacaccacatgccagacatgcatccataatcgtcagatcctgatatggaagcgcaatattcattaccagatccggtttgtaatcattgatcagttcgatcagctgatccacatcgtctgcatcaaccttggctgtcgtaagaactgtttttgtctttcctttcaacttttctgcaagtgcatcacatttttcctttgtacggcttgcgatacaaagttctgtgaagacctcatctgcctgacaacatttctgaattgctacactggctactcctccgcagccgattacaagtactctgctcataactcttctccttttcttcaacagttatatatttataatattcttgtaactgttcagagccaaccttcaaaatgctacgcattttgaaggtgtggcgtatccgccaagcaaaatttcaaaaatagtcttaaaaatgcaagcattttacaactgtttttgaaattttgcttggctctgaacagttacatattcttttttataattgctctcttataagttgccggtttattttgcaattgcaagaagcagttcacgaagaaccttacatgctgttgcggttgagacaccacttgcatccaacataggagcaagttcattcacatccgctcctactacatttgcctgtgcaactgtacggatggcttcaagaagctctaagaaagttactccccccgcctccggagtccctgttcccggaaatactgccggatccagacaatccagatcaattgtaaaataaattggtacatttttctctttcagttctcttacagtctcttccagtccgtcaaaagaaagtggatggaaatctgtatgctgcgcggcaaatctaaattcttctctctctccgcttcggatgcagaactgatggatacggccgtctcccagaagatcatggcatcttcgcagaacacaggcatgactcaatctggctcccagataatcatcccttaaatctgcatgtgcatcaaaatggatgatatgtagatccggatatttcgcagctacagcgcgtactgctgccagcgtcaccagatgttctcctcccagaagcaatggaaatttatctgatttcaatatttcttctgctctcttttgaatatccgaaagcgccatttcactgcttccaaagcaaagttccagatccccgctgtcaaatacactgatatccataaggtctctgtcctgatatggactgtaagtttcaagtccgaaactctcatgacgcatagctgccggaccgaatcttgcgcccggacgaaaacttgtcgtcgaatcaaacggcgcaccataaaggacaatcgatgcttcctcaaagctgctttcgcatcctataaaagtttctatattcggtaaaatcatgaattattcctccacttctttcagcatatcttccagaaatgccggaaggtaaaatgctcctttatggagtcttgttgtatagtaacgtgtacgaagatttaatgcattccatgcttctgcgtccagatcatctacgggatgatattttttgctggcaaatccaaacaaccagtaacctgcggcaaaggttgggatatgtgcctgataaacacgactgatctgaaaggtacttgcaattcttttatggcttcgctgcattgcatgtgcatcttctgcgtagaatggacttccctgctgattgaccataattccatcctctttcaatgcattgtaacaattcccatagaattcgcgggtaaacaatccttccgatgggccaaacggatccgaggaatctacgataataagatcatattttgcctcgcatcttcggataaaacggagtgcattttcgtaatgaagatgtactcttctgtcatccagtctgcatgcattttccggaaggtatgcacgacatgcctcgacaaccatcggatccatttctaccagatcaatgtgtctgaccctgtcgtatctggtcagttcgcgaacaacaccgccatctccggctccaatcaccataatatcttttgcttctttatggattgccatcggcacatgcgtgatcatctcatcataaataaattcgtcacgttctgtcagcattacatttccgtccagagtaagaacacggccaaattccggtgtctcaaaaatatcaattctctgataatcactctgtctggaaaagagctgacggtttacccggatactgtgtttcacatccggtgtatggaattccgaaaaccacatttccattattattacctccctgtcagaacattcagtttcaaaatatccggatcttccggtccggtcatattacaacccttcgcttttgcatactcgatataatccagaatttctgctgtgatgcgttccccaggcgcaaggatcggaattccaggcggataacacatcacaaattcactacagaccataccttctgtttcccggagtggcagactgcacttctctgcataaaaagcttcctgtggactggccactacctgaggatcaatatattcctgactcagaagtcctgttccgtctgtctgaaaacgtctgcggatctccgcaagtgcactcacaagccgttctacttcctgtgcacggtctccgatcgaaaggtaagcaagaatgtttccaatatctccaaattcgatctgaatgtcgtattcatcacgcagaatatcataaacttcaattcctgcgagtccgatatctaacgtatgtacacttaactttgtaatatcaaaatcaaaaacagaatttccatttaccagttcttttccaaatgcataataaccaccgattgcattgatttcctctctggcatattccgccatatctgctacctgatggaaaatctgacggccacgttgtgcaagattccttcttgaaatgtcaagactcgacatcagaagatagcttcctgatgttgtctgtgtcagattgatgatctgccgcacatacccggcatgtacgtccggacctgtaagaagcagactcgactgtgtaagactgcctccgcttttgtgcatggatacagacgccatgtctgcacctgcttccatagctgaaacaggaagtcctccaccgaaataaaaatgtgttccatgcgcttcgtctaccaggcacatcattcctgcctcatgtgccatcttgacaatcgctcgcagatcactgcatattccatagtaagtcggattatttactaacactgcgactgcctttggatgctcttttatcgcttttgctacctgttctctttgcattcccagggaaatcccaagccgctggtctacctccggatttacataaacagggatcgcaccacataaaacaagtgcattcaacacactcctgtgaacattacgtggcaatatgatctcatctccacgtttgcaggccgtcagaaccattgtctgtacagaacttgtcgtgccccctaccattaaaaatgcatgtgctgctccaaaggcatctgctgccagttcttctgcttcccgtattacagataccggatggcagagattgtccagtggtttcatactattgacatcgacgcctacacatttttgtccgagaaattctgtcagctccggatttcctcttccccgtttatgaccagggacatcaaaaggtacaacccgcattcgtcggaaagtctccagagcctcatggatcggtgcatgattctggtttaatttaaaacgactccctttcatatttcctctctttccaggtccctttgttaaaatattttcttaatacagaaaaaaacgcagataagggcgctaagccacaaacctgcgttcggtatgtattcgtctgttttattctcagctgtaacagaaaaggcaatatcttctcttagatttttaaataaaacttctggatcatgcgtgtcagagtctatatagcaattatacttttactactcttattgaccgtttcacaagtctgcgcgtctggcgcatcaaggctatcaaagaaacctacttataaaattagagcttttaactcaatcaataaggcaaccaaagttaccataatcggcagtggacccggctgtccgtatggccttaacctcgctgggtggtccgaaacaattgctttgaaaagactctgtctgttactctgcatcttcgtctctcaaaatcgactatagcataacatgttaaaaaagcactgtcaagaatttctcccatctatttcattactttcttatttccgaatattgaaatttaattatttctttttctcatacaggaactcttctggaagtgttacattgaagtcatgtgccagttcgcggaagttttccggagtgattgtctgaatctttcttggtgtcatagacagaatcttcacaagaatttctgctgacttctctactgtatgcataagaccgaatgtaagatcaaagtcttctcctgaacagaacattccatgatgtgcccagatagcaacatcgtatttctccatcaattcagctgtcttttctgcgattgctcttccgcccggaaccatccagcctacaactccaactccatccgggaatacaaccggacactctgttgctgactcccaaagttctcttgtgaacacctgatcatccaaaggaagtacgaatgtcaacgcgattgtatttgttgtatgtgcatgatagattacacgatgttttccatttgtgattcttttcttcacttcatggttcatcagatgagtcggaagctcacttgtcggtcttcctccctctaccagtccccaacggattctgtattttgttcctgtagaatcaatctcaataattgcaagacacacttcagggtcaacgataatatttctgaaatactttccacttcctgttacaaggaagaattctcctgcaagccccggaacctctgttccgatttctgtccattctcctgattcattcagacgtggtctgatcagttcaacctcttctggtttcaaacgataacttaaattaccaccatttctctcatgccatccctgaaggaatccgtcatttgccattttaataaagtcctgtacaaacttcgcatctaagatcttcatattattctgttcctcctgtttttacccattcgccacattgttgttttgtgtggtttatttcttgctttttattgttttcttgtggtttctatttgtattatagctgtttttatgtggtttgtaaacactttttcgataaaaaattgcacactctaaaagacattaacataaatcaagacttataagaaaaacatgtttctatctattgcaggtggaactatctgttctatgttgatattacattttctataataatctcaatggcaaaagtgctgaggtctcatagttcttacggcttgcatctgccgcaaggctcatatccttctttaatcagatctgacctacttcctgtatacttttctttgttctctgctttgatatccttcacaccagaacaggttgatttatgaaacttttttgtattcttattcaatatataagtttctttttttgttaaatttgatgtttttgacgaattggatacattttcttcagtcacttcagcttctgttccaggagcccactcaccttccggcgttgtgagttcttccgtctgataactctctcctgtctcataattgatcacaacatatggctgtacattatatacgtatacgttaaatgttacccctgcgccatcatcttccaccgacttcgcctccatctggactccggaagctaccaaatcatcgccgctatagatcggagtgacacgatacatcacatgattatccgtttctttaacataatctgccacctcatcctcgaatgggagcatgccatctacattcatatagcgtgttcctgtaatcagattgcgctcattcgcattctcacctgtcagctggaaaccaatcagatgacagcgattgtacagatacccaccgtcaattccatcatattccttattcacccagcctgttggcttcacactgctgatgctttctcttttctgtgtcggcatcaaatcttcacccacacaagcctccgctgtctgacatcttcccagttcatctaatggactgtattcctcataagaatctgttgtcagttcttcttcagtaaatgaaggctcattatcattgatctccacatatggctgtcctgtatactccggtacttcttccagcgtatctacagattctatctgcccggttgatgcaaatgttgtctctgctgtcgtttgatttctgtgaccagagtcctgattgcctgatccttgtgatatctgcagtggtccacaggatgtcagaagcagacaaagagtcgttatgcatccacataatattgttttaaatttctttttgctcatatttttcgctcccctttttttcgaacatatgtacttgtaaagtatacactattttttctaatataggaagtactttgaattctacaaacttgaattcctggatgagtataatatgcggaaaataaacttaactccatcttaaatatagtgctgagtttcactgccattctttaacaccattttcaccacaccaagcaatgctgcaaacaaaacaccagcaaccggccatacaatccatgtaatatcccagctcatcgtccagaagctccatgcaaggtaaatcgctgtagtcaagcaccaatatacaccagaaaacgtgttagtctttttcttaaacagttttgattcactcctattgcaagtatgaatagcagtaatccgacggaaagaccacagtaatagtcggacgcttccatagatccggcaataattgtcggaatcactgccagtatacaaagcactaccccaacagctgttcctctgataaaaattggttcataggaatcttttttttctcgtaccattccagatacaccatactctgtttcaaagcattctttttcaaaatgttccatatgtgattcacgcattccatatgtaataaacaaaaagacggctgccgcaaccattccaagcaaaaaaacacatccaaatactgttgccagagattccgaaacatgaaatacgctatcttctgccattgtcacaagaacaatcaataatattggacttaagatacacatacttgctgcgtttgccactactttggatccatttcttttcatgtcaagaaattcatttgcattctccatagttacttttttcaacggttctgcatagctttcagtactttcgtgataggtgatattttctgcttgcatttcatcttttaataggtaatctgtactaacaccaaatagctccgacatctgtaaaattctttgcaaatctggaacagctcctgcactttcccacttagatactgcctgtctggatacgcccaactgattggctagttcttcctgtgaccatccattcttttttctttcctctgtaatcttatcagctaaaatcattttttcctccttttgcagattttatgagctaaatataacagttttgctgtttgcattccaccatttcaggctgtaaatctgtcaaccagcagttgcaaatcacaaaaggactctatgaatcccgattttccagcaatacacgcaggaaattatttatcatctgtatttgttttattgttttcctttttcttataagtcgaacctaagcaaagaaatgcggaaccaagacttaaccatattatagccatagtatttttatttccactcgtaaagtctatagctgaggctacgagaaacagaactgatgcaatataaaataagattgatttatttattccttttttcataaataagaatctcctgcaaacaataatttattttaataaatattttttaaacgctttatgattatcaaagtggacttctctaaaaaacagaactaaccaaataatataggttggtatagccatatatggagttaaaaagcaggataatattgctcctgccaacattataacagtccatatgaagcactgatttcttatatcacgagagatctgagctttatcatacattgcctgttcttctttagaaaatgaattaaatcctgaaacaaatttagctgctttttccttaaaaatcgcaaataacacacctataattacaaatggtataaccaaaaatatacatgaccaaaatcctatattcataatacatacctcctcttaaaataccaatttctcagtttcaaagactggaatttatcggcatcatttgtcattcaaatcatatcacacaatcagccatatttctatttcaatttacttagtcaagtcacttcgcccagctatagttactgttcacacgatgtgcgaccagcaacacatctcgccattttaaatcatttttctaaaaaagacaaaaaaatagaacgcatagattatttccatacgctctatctcacatttcatattaaatttctgcccgtctaaccggcactctgaccggtactggttctggcatcagtcccgggatcagacgattcataaaatctttgatcttcttccctgcttttgtattgatccatctataatattgttctattgtcatactattctacctcctattcaggtctcctatcataagtaaatgatctgcatttctgctatatatacccatgccatattattcttttctgacatggctgtattttatcagatgattttctttttgtcagtgcatttaccgcttattttagaattgtttatacttcttttatgaagttttgaacacatttatctttgtcatcatttgacataggagcaatctgattttatagaattttcatttccccacatttgccacattctcccagatatgttatgattgtaactgttctattgtgattcgtttttgcatcggttatgatactgattaacacagacaagatatctttcagaataagaacaagaatatcagaaatggggagtttacatgtcatctacatcgaaagaacctgctgcaaaggagaaggactctactgcgaaagaacttttccaatggctgattgccattttagcggctgttgctattgctttatttgttgataattttctaatcgtcaatgcacagattccctccggttcaatggaaaacaccatcatgaccggagatcgtgtggttggtaaccggctttcttatttaaccaaggatcctgagcgttatgatataattatttttaagtatcctgatgatgaaagccagctttttatcaagcgtatcatcggacttcctggtgaaaccgtggagattcgtgacggtcacatctacattgatggttcttctgagcctcttgaagatgtagagacgaaagaatatatggtcggaaattatggtccttataccataccggaaggatgctattttgtgatgggagataatagaaatgattcgaaagattcccgctactggattcatccatatgtatccaaagataagattcttggaaaggcagtctttcgttactggccgatcacaaagataaagatgattaaataagtttcagatatggaggggctgttggttaatatcaattttcgggtaactgcagtccctccctatttacatcttataacaacctttttcagagatcacaagatccatccgcagatcatgttcttccaccggaatttcgtctacaagcagttcctctctgcaaagtactgctttcacgcaatgcgtcttttccagatatctgtcgtaatatccacctccgtgaccaagtcgtcttccgcttctatcgcagctgatacatggaattaaagcaaaatcaattgctcccggctgaatcaatctttccgggtcttcttttggttcaaggattccatatgcacctggatgtaactcttgtaatgaatggatttcgtatacgttcataattcctttttccatacactttggcactccaagacgttttcctgattgaagaatcgcctgcaatacagaaaatgtatccatttcttttccggtgcttacataacagaacacgcagcctgcactctgatattcttccagtttcaaaatgctttctgtaatttttctgtctgcttcttttctgtatttttctgttgtaaaagaaagtttttcttttatttttcttcttaattctttctttcgaattatcttctcttctgtttttctttccaattcttccactcttttctctgtttgtcttgtttaaccgttttcttcacactattcttcttcgacagattcaatcaacaggtgatccagattttgcatgtctgcttttctgatcccatattttccctctttatctttttctacatgaagaacaattttatttggttttccgtaattcaaccctttctttgccgtctgacttagaacctcataatagatctgatagatttctgtctgcatctgtgtttcttctggcatagcctgtccattcatcacatcgtttgaaacttttgtagcatattcctgtgccttctcctgaaattcagcataagtatccttcagcaatgtgattggtttcactgtaagaacaacctgataagttccattttcttccctggttgcttctcctacagtataagatgtcttctttgcaagatctgcaaacagttctctatattctcctgccatctcatccgtcattacatgctccggaaatttttctattgtataatccagattatcttcgaaaatctgttttgcttctttctcggaaatgccggtctgttttatataggattctgttttctgcttataagatacatctaaaaatgcctgtacatattcctgtggatcaaaacggtttatgtaacaatagattattgttgctgttgctgcgacaataattgcaaccattataattccgactataaaatacttcttttctttttttcctgacatcactttactccttttctaactgtaatttgaataacttatttgtaactgttcagagccaagcaaaatttcaaaaacaggtataaaatgcttgcatttttaaaactgtttttgaaattttatttggcggatacgccacaccgacgaaatgcgtagcattttggaggttggctctgaacagttacacttagtttatttctgtcacagtatagcatgatatcagttcacattttgtagaatgatgtcgcctgtatgcaacgcttttcagatggaagaacgaaagtcgcatgcatgcaacacttttcagatagcaagaaagagatacgtaatcgcatctctttctccttgcagacttgtttcttttgtctgctttctctttcatttacagatcaaatctgatcttgatatatgctttgatttcttccacacatttttggaatccaagttttccgctgttcaggcacaagtcatagtttcttgcatctgcccactcgtgtcctgtatggtaacgatagaaatcaccgcgaaatttatccgtcttctcgatgtattttttcatttctttttctgtcatactgttacgctccattgcacgatcaagacagaatttctcatctgcatgaacaaacacactgacaacatttggattgtctttcagaacataatctgcacatcttccaacgattacgcaggattctttctcagcaagatctttgatgatctttgcctgatagttgaagatattttcttctgaaacaaaacctttttcttccggtgaaagaagttctccatcgtatggacgactcaggattttaaaccatccggctcccttcatcttctcatcactcataccgaagagtctctcgttgattccgctttcttcggatgccatacgcaggatttctctgctataacagttgattccaagctcttttgcaagcatagctccgattgtcttaccgccgcttccgtactgtcttgccattgtgattacaatattgttgctcacccgaatcgcctcctattctcctaaatatgctttcttaactgcttcatcttccagcaggtcttttgcatttcctgacattgtgatcttaccagtctcaagaacataggcgcgatctgcgatagaaagagctttctttgcattctgttctacaagaagtactgttgttccactctcacttactgcctggataatatcaaaaatctcatttacaaagattggagaaagtcccatagaaggctcatccatcagaatgatcttcggtttagacatcaatgcacgtcccatggcaagcatctgctgctctccaccactgagtgttccggccatctgatttcttctctcttccagacgtgggaatctcttataaacatttgcaagactctcttcgatctcatttttatcttttcttgtataggcgcccattttcaggttttcataaacactcagttcagcgaaaactcttcgtccttccggaacgtgagccattcccatagacacgatcttatgcgccggaatctttgtgatatcagttccttcaaacataacagaacctttctttggagaaagaagtcctgtaattgtatgaagtgttgttgtctttccggctccgtttgcgccgatcagtgcaataacctctccctgatttacctcaaaggaaatgcctttgattgcctggatcattccataatatacttctaagtctttgacttcaagcattgccattgttatcttccccctattctcccagatatgccttgattacctgaggatcattcagtacatctgttgtcttgccctgtgcaagtacttcaccgaagttgagtactgtcagctcctcgcagataccacttaccagtttcatatcatgttcgatcagaaggatcgtcatatggaactcatctctcacgaaacggatcatatccatcaattctcctgtctcgttcgggttcattcctgctgccggctcatccagaagaagaagctttggatccgtcgcaagtgctctggcgatctccagttttctctgctgtccgtaaggaaggtttgcagccttatatgacgcaaacttctcaagatcgaataccttcagaagctccattgccttttcatccatctctttttctaccttacgataattcggaagtcttaaaattccttcaatcgttgagtaatgatgatgattgtgaagtcctactttaacattatcaagaacagtcagttctttgaaaagacggatgttctggaatgttcttgcaattccggccttactgatctcaatatttttctttcctgtaagatcctttccgtccaaaagaacctttccagaatccggtttatatactcctgtcagaaggttgaatacggttgtcttaccggcaccatttggtccaatcaatccgtaaagttcttctttctgtatcttgaggtcaaagtcatttaccgcacggagacctccgaaagaaattccaagattttttacatctaataatgtactcattcttacttaagcctcctttttctttccaaaatgaagatacttctctctccactcgattgcctttggtgcccagttaaagagcatcatgatgatcagaacgatcgcatagatcaacatacggtaatcagacagtccacggagaagctccggaaggagtgtcaggataactgctgcaataatagatccacggatatttccgattccaccaagtactacaaagacaagaatcgtgatggacatattgtatccaaagttgtttgtatttgctgtcagtgttgacaggttgtgtgcatacagaacacctgctgcaccggccatagccgctgaaattgtaaatgccatgagtttatattttgtaacattgattccgatagactcagctgcaattacattatcacgaattgccatgatcgcacgtccgtctctggaagtaaccagattcagtacgataaataatgtcaccatgatcaggataaatccgatcaggaatgttgaatccttcggagttcctgtgattccctgaggaccgttcaggataactgttccgtccggatccatgtcaagtgccataacgtcctttgttgcgaaatgaaatcctttggaatcctttccaatataaagaacatttacaaggttcttaatgatctcaccgaacgcaagtgtaacgattgcaaggtaatcgcctttcagacgaagtaccgggattccgatgataacaccgaagattgcagccactacaacaccgatcagcaaagcaagtaaaaatctaacgattgagttttcaatcacatctctcatacattttgagaaaaatgcactggaaaatgctcccacacacataaatcctgcatggccaaggctaagttctccgagaatacctactacaaggttcagagaaaccgccaggataatatatgtacaaagcggaacaagaagtcctgtcagaagactggaaatacttcctgtactgctcaaagtctgcatcactacgaaagctacaatcacgatcgcataagtgatgagattacttttctttgatttattcatattcttcaacataattccatccacctacactttctcctgaatcttcttgcccagaagtcctgtaggcttcacaagcaacacaacgatcagaactgcgaacacgatcgcatctgcaagctgggaagaaatgtatgccttactgagtatctcgatgattcccaaaagaattcctccgataaatgcacccggaatggaaccgattcctccaaatacagctgcaacgaatgctttgatacccggcatcgcacctgtgtatggtgtcaggctcgggtaggtagaacacagaagcacaccggctactgctgcaagtccggaaccaatcgcaaatgtaagagcaattgttgcatttacattgatacccattaattgcgctgcgcccctatcctctgatactgcacgcatcgcctgtcctggttttgtcttctgaacaaatgtgatcaatgcaatcataataaccacacaaactacgatcgtaacaattgtctctcctgaaatattcagcttgccatctgcaagtgaaagtccgctccacttgatcactgatgggaatgtctgtgcattcgcaccgaagatcagaagtgctacattctgaagcagataactgacaccaatagctgtgatcagtacggcaagtgaagatgttgcattacgaagcggcttatacgctacacgctccatcagaacaccaagtactgtacaggcaatgattgaaatcaggattgccacccaggtaggaagtcccgcctgcttcattgtgatcaaagctgcatatgcaccgatcatgatcacatcaccatgtgcaaagttcaacatcttggcgattccatataccattgtgtatccaagcgcgatcaacgcatagacactgccaagacttagtccatttactaaatatgaaataaagctcatatccgtccctctcatcctttttatatttttgtaaggtactactttaaccttttaaattgaattgattatagcataattattttctcgtatcaatacaaaaaacagaatccgctctgttttcctgtattattttttaacttttgtaagaaaaaagacagcattttctggtttttctatctataccgaaaaatactgtctttttcttctttcgcggattcttatttacaaacttttatgaagcaatccaagtactgttgtcagatcttcaatccccatctgtcccggtgcagatacttttccaactgctccaaatgtcagtgcagaaccaaagacttctccacagagacggctgatcacacctgttcctgacatagacattgtaatgatcggacgatccgcatactcgcttgccatctcttctgtcgctgcaagaagtgtaagaacatctttcttattctgtggcatcacagcgatcttcggaatatctgctccaagatcctgcatttttcttaaacgggatacgattttctcttttgccggagtcttgtggaagtcatggttcgaagcgatcacttttactccatttgcatgtgctgtctcaacaacagccttcacaacctcatctcctgtaaatgcctctacgtctacaaggtcaataagtcctgtctttgctgcattctgattcagttcaacataagctcctgtctcgattgctttttctccaccttctttggatgtgcggaatgtgaaaaggatcggcatctccccaatcacctcacgaagtgcctgcattgtcgcctctgtctttgcaaaatcaaagatatcttcataccagtcaacacgccactcaacaacatccgcctttgttgacttgatattctcggctgctgcaagaatctcttctcttgttacaccaacaataggtacgcagattttcgggattccaacaccaatttcaacatttcttacttttactgtattcatgatttttaccttccttaaattttcttaaacatatatccactgtgtcaatcagtaatgtgatcaacacaggtttgaacagtaacattatacttatttttatccaatgcttctaatacatctttcttccttttttgatagctttatactatcattaaatggatatcattttctctttctgtcatggaacaaaaaccaatgtcaaaccgttcctctttcaatccctggatgatctctgatgtatttcctactgtaaaacggaaatgaactttcagttcctcatgtgttctcaaaaaatcactcacaagctgtggaacgaatacacttccaagggtataaatgtacgccagctcaatcactccctctgtctggccagtcattgttcttaccttttttacccctgtatcaagagaataccgggcgttatccacatattccttgaataatttcccatatttcgtcagaaccactccccgtccatgtttcttaaaaagtcttgttccaagctccttctcaagacttccaattgcatgacttaagcttggctgggagatttttaattcttctgctgcttttgtataatgctctacttccgccaattttgaaaaataatgcagctggtttaaattcatctctatctcctttctgaacgcaattttctcttttttataaaatatcacaattcatagctttttttctatagaatccgcaaaaaacatgtatttgttttatataatacgcattgtaaacatagattgttaagcacctgtcaatcatggacttcttccacgtctgttcaagctgacagaaactgttcatcagcacggagcctgtatcggtatccagatcaaccatgcaggagcatccgctcagtctaagagaacaaatatgcagccagtatccgcttctgacattccttctaaagcaggtggagagattccatgtccgctttctaaagatgaaatctaccgtatcgttaaaaagtacggtgaagcggcaaagcgcgctcagatcgccggatttgacactgtagagatccatggaggacattcttacatggcaaaagctgttaaagaacgttttggaaagccatgtgtaacaatgggaaatatccgtgatcctcacatagcggaagacatccttgcaaaaggcgacgctgacctgatcggtataggacgtggactgattgccgatcctgactgggtaaataaagtagaattcggtgatgtctgtgatatccgcaaatttttgaagatgatgactctgttgagattgtcaatatcggcgacagcgtaagagcaagaagaattattgaaggtactgaagaaggtagaaatatcatcaatgtgctgaaaaaacgtgaatatctgtaagatttgggttctctaagatttctaaaaagaagtcccccggcagagacgacgtctgtcgggggacttctcctattcttttaatgtatctacaaagagcgttgctactctctgtatttatttttctaaatgaatctgatatatcaattattcagcagcatcttctgcctgaagtacctgatactctccactcttaacaacaactactgtaggatcttttgtaggctctccatcctctgaccatgtgatgctctttcctgtaagtccatcatatgtgatctctgtcataccttttttaagtgcatcacagatatctgatacgctcttatccggtgtaacatcttctttctcagctgctgctttgattacgtatacacagtcataagcatctgctgcgaactgaattggtgtgtctccgaatgcttctttgtaatcagcaacgaatttctgtgttgcttcgtctgtagcatttgctgtaaatggtgtaaggaacattaagtcttctgcaagacttgcgtcaaatccatcaagatcaaggataccgtccataccgtcacatccgaaccacttcggtgtaaatcctgctttgtttgcctgagcaagaatcagagaagcttcctgatagtaaattggaaggaatacaagttcagcacctgcatcttttgctttctggatctgtacagagaagtctgtcttgttatctgctgtaaatgcttctgctgctacaacatcaagtccttttgcctttgcctctgtcgcaaatgtctgataaattcctgatgaatatgtgtcagagctgttataaatgattgctacttttgttgcaagcttgttctctgcaatgtaatctgctgatgcgctaccctggttaggatctgagaaacacatacggaatgcattgtcatactggatactgtctactgctgtagcagatggtgtcagctggaacatgttatctgaatgagtctcctcaacaactgctgtacaaggtgtagaagttgttgttccgatcagtgcctgcattccccagtctttcagagtattgtaagcgttcacagatttctctgaatcagcctgatcatcttcaaacttgtattcaatctgctttccgttaattccgcctgctgcgttgatctcatctactgcaagctgaataccattctttacagctgttccgtagattgctgcatctcctgttgtaggtccgataccaccaatcttaaaagtgtcagaatcggatgagcctccgctcttatttcctgaacttccacatgctgctaatgatactaccatagctgatgcaagcattacacttgctgcttttttccacatcttcataataataatctcctcctagaaattaaaataataaactttatgtgtcatatattagctcgtagaagtatgatttgtcaagcagaaatagagtgcaatctgttttttatctatattcgttaaatatggtcaagtgatgttaaaatagatcaagttggttgttatatctattaatctgatatcttaatacatttcgttctatggaatcaggttctgtttctaaccatgataatgcagacttaacatcaatcgaaaaaccacttcccaaatatttaaccatcttttcatgagagccacaaaatggacgtgctataactctttttacattttcttctatagaaaaattccaatttacactttggtttgctgtcaacaaagatactccgttatcaaaaattggtgccggataaaaatcatttccacgcataatcaaagccagattatttaaatgcctgtcctcatttaagcaaatcatatccaatgtcaacactttactcaaataagcatggatgtttaatccacagctttgatcaataaaccggataacatattctattctttcttccattgtattcatgttagctatgactttcgaaagatcttttccaacttcattataatatagcctataaaacgtgactaattcttcctcttcatctaaaaaatttttactcctacatcctgattttccattaattgttccttcttcataacttataaattcattttcttgaagtgtagtaaactgcataaactttgaaacaagatattcagcacgtccttcatttcctctattatcttttttataccaatagccatcttttttatacttaacctgggttccttcacttgttccttcttgaataacaatataatcatttcctatattttcactaaacatatcttcaccttaccaatacatctttgcttgtgatattttctcccggaaagcgaaaccatataaaatcattatgactgacaccatgtgtctttcgtactatttcatatggattatactctttaagtcccagatgttttaagatttcatcaatatcaggcctacctttttcaaagcatcttaattctaagatcttgcctaactgataacgagtcatcttcttctctgcaaatagttgtcgccctggattgtctgaaaagcgtgatacaataacatttttctttttcacatatactctggacgtaatttcatctttccagtatacttcaaaagtaaattcatccatgaaattttcttttttagtcctcttctcatagcacgctaacatcttacttgcagtcataatatcccattctaagtcttgtatctcatttgacaaatgctcaattcttaactgaatattttctatatctgctatctttcccggaataactggagacagatatctgcttttgacctttccatctttacgttgttgtgcataataatataattcgccatgaattttctttattgtaatattttgcttttccgtagaaatttcttgtaattcttttttcttaatatccaactcctttttataaagtgcttcttgatattttaacattctataagtttgttgtatctccatagttcatcacccattattattgtaacctatatttttatttttttcaatgtgtgtaggttacttaattttgcaaagaaaaaaacagcgctttcgcactgcttctcattcctgtctatatatcatgtaccttcaaaactacatacagtcaaaaccaacatcatcatccaaacctatcactgctttggttatgccctcgacctattagtaacagtcagctccatgtgttaccacacttccacctctgccctatctacctcgtcgtcttcaaggggtcttactaacttgacgttatgagatatctcatcttgaggggggcttcacgcttagatgccttcagcgtttatcccttcccggcttggctactctgctatgcctttggtaagacaacagatacaccagcggccagtccatcccggtcctctcgtactaaggacagctcctctcaaatatcttacgcccacgccggatagggaccgaactgtctcacgacgttctgaacccagctcgcgtaccgctttaatgggcgaacagcccaacccttgggacctacttcagccccaggatgcgatgagccgacatcgaggtgccaaaccactccgtcgatgtgaactcttgggagtgataagcctgttatccccagggtagcttttatccgttgagcgatggcaatcccactttataccaccggatcactaagtcctactttcgtacctgctccacccgtcggtgtcgcagtcaagctcccttctgcctttgcactcttcgaatggtttccaaccattctgaggaaacctttgagcgcctccgataccctttcggaggcgaccgccccagtcaaactccccacctgacattgtcccccagccggatcacggctgctggttagaaacccagtactgcaagggtggtatcccaacattggctccatggcaactggcgttaccatttcctagcctcccacctatcctgtacatgcaataccgaatcccagtatcaagctggagtaaagctccatggggtctttccgtcctggcgcaggtaaccagcatcttcactggtatttcaatttcaccgggtgcattgttgagacagtgcccaaatcattacgcctttcgtgcgggtcggaacttacccgacaaggaatttcgctaccttaggaccgttatagttacggccgccgtttactggggcttaagttcaaagcttcgcttgcgctaacctctccccttaaccttcccagcaccgggcaggcgtcagcccatatacctcacctttcggttttgcatagacctgtgtttttgctaaacagttgcttgggccaattctctgcggccatcttactggcactccttctcccgaagttacggagtcattttgccgagttccttaacaatgcttctcccgtcggccttaggattctctcctcatccacctgtgtcggtttacggtacgggtatcctgcaaacaatagcggcttttcttgacagtcagctcacgtgcttccctacttattttcagtccacatcacgtcttcggattgcctggcggatttgccaaccagactcctacctcgcttgtaccggtctttccattcccggctcacgctctctgcctgtgtccccacagttctgttacaggatagtacaggaatttcaacctgttatccatcgactacgtctttcgacctcgccttaggccccgacttacccagagcagatcagctttactctggaaaccttagatattcggccggaaggattcccaccttcctctcgctactcattccggcattctctcttcttaaaagtccacagctccttacggtactgcttcgtccctttaagaatgctcctctaccaattgaattaattcaattccaaagcttcggcagtgtgttttagccccggacattttcggcgcaggacctctcgactagtgagctattacgcactctttgaatgaatggctgcttctgagccaacatcctagttgtcttcgaaatcccacatccttttccacttaacacacattttggggccttagctgttggtctgggctctttcccttttgaccacccaacttatctcggatcgtctgactcccatacatcatctacacggcattcggagtttgatatcccttagtaagctttgacgcccccttaggaattcagtgctctacctccgcaagactcgtatgaggctagccctaaagctatttcgaggagaaccagctatctccgggttcgattggaatttctcccctatccacacctcatccccacccttttcaacggatgtgggttcggtcctccattgccttttacggcaacttcaacctggacatggatagatcacccggtttcgggtctactccgactgactatgcgccctattcagacttggtttcccttcggctccggacctttagtccttaacctcgccagccagcgtaactcgccggaccgttctacaaaaagtacgcggttgagcatataaagctcttccacagcttgtaaacatatggtttcaggttctttttcactcccctcccggggtccttttcacctttccttcacagtactatgcgctatcggtcactaagtagtatttagccttacggggtggtccccgcatcttcccacaaggttccacgtgtctcgtggtactctggatcccgccatgtcaactcgtctttcgcttacggggctttcaccctctctggccggctttcccaaaaccgttctgctaaactcgttgaatcaattccgcggtccgaaccccagcatgcacgcacgctggtttgggctcttccgttttcgctcgccgctactcacagaatcacatgttgttttctcttcctccggctacttagatgtttcagttcaccgggttcccttccttaagttatgtattggcttaaggatacttgaggtttgctcaagtaggtttccccattcagaaatctccggatcaaaggatatttgctcctccccgaagcttttcgcagcttatcacgtctttcatcggctcttagtgccaaggcatccaccatacgctcttatcagcataaccaactcgacctcatcccacgggaatgggataatgtccacacatacatagcgttgtatgcgttggtgatagtcaatttattttaagtctgttttcttcagactgtaagttaatgttgttaacattacctcggatgtcttgattagatatttatctaaatctattgatttttactatatgcagttttcaaggtacataagatgaagtccttattcagttcttcatccgactgactttttcatcagtcatcagagactaaaagttttcttttaaactctgatcactggtgaagaccagctttatcgcagaacctctcggtttattttctttttaatttggcggccacctactctcccacaccgtctccagtgcagtaccatcggccgcttaggtctttaccatcgtgttcgggatgggaacgggtgttacccctaagcgcatcgccaccaaaaggtttaggttacttgataacccaacaatagacaacagtaaaaactctctacttttttcttccttagaaaggaggtgatccagccgcaccttccgatacggctaccttgttacgacttcaccccagttatcggtcccaccttcggcagctccctccttacggttgggtcactgacttcgggcgttactgactcccatggtgtgacgggcggtgtgtacaagacccgggaacgtattcaccgcgacattctgattcgcgattactagcgattccagcttcatgtagtcgagttgcagactacaatccgaactgagacgttatttttgggatttgctcgacctcgcggttctgcctccctttgtttacgccattgtagcacgtgtgtagccctgctcataaggggcatgatgatttgacgtcatccccacgcttcctccaggttatccctggcagtctctctagagtgcccggccgaaccgctggctactaaagataggggttgcgctcgttgcgggacttaacccaacatctcacgacacgagctgacgacaaccatgcaccacctgtcatccctgtcccgaaggaaaggcaacattacttgccggtcagggagatgtcaagagcaggtaaggttcttcgcgttgcttcgaattaaaccacatgctccaccgcttgtgcgggtccccgtcaattcctttgagtttcattcttgcgaacgtactccccaggtggactacttattgcgtttgctgcggcaccgaacagctttgctgcccgacacctagtagtcatcgtttacggcgtggactaccagggtatctaatcctgtttgctccccacgctttcgagcctcaacgtcagttaccgtccagtaagccgccttcgccactggtgttcctcctaatatctacgcatttcaccgctacactaggaattccgcttacctctccggtactctagattgacagtttccaatgcagtcccggggttgagccccgggttttcacatcagacttgccactccgtctacgctccctttacacccagtaaatccggataacgcttgcaccatacgtattaccgcggctgctggcacgtatttagccggtgcttcttagtcaggtaccgtcattttcttccctgctgatagagctttacataccgaaatacttcatcgctcacgcggcgtcgctgcatcagggtttcccccattgtgcaatattccccactgctgcctcccgtaggagtttgggccgtgtctcagtcccaatgtggccggtcaccctctcaggtcggctactgatcgtcggcttggtaggccgttaccccaccaactacctaatcagacgcgggtccatctcataccaccggagtttttacccctgcaccatgcggtgctgtggtcttatgcggtattagcagtcatttctaactgttatccccctgtatgaggcaggttacccacgcgttactcacccgtccgccactcagtcaccaagatcttcatccgaagaatcgaatcaaggtgcttcgttcgacttgcatgtgttaagcacgccgccagcgttcatcctgagccaggatcaaactctcgttaaaagtgtttgtatccagttcagaatcaactaactagctaattcttccctttttactgttgttttggtttgtttaaaaaccgttcttaaaaatcttctcttaaagaaattttcaagggttgttgttgtctattgttcagttatcaaggttctttgtttgtgtcgttcttttcaagcgacagcttttatattttatcaaaagcttttgtctttgtcaagaacttttttatttttctttcactgccgaatccgtttgattacttctcactagcagtgtatttatgctatcacattcaaacttttctgtcaaccactttttaaaatttcttataagtttttatcatctttacttataaatcttttcttcgaactttttctctctcagggactgtccgcctccgcgccttcctcttattcaagcgtctgttctgtagttttcagtgccgttctcagcgacgaatgttatcttatcatagccatttctaattgtcaatgttttttatatatttcatgcaattcagaatattctgaaaaattagtatctgcgttccccgaccctaccagattttgcaagcttgcttgcaataaactagtaggggtggggaacatagggcgaatgcccttaaccggaaggacgtcagttctttcggttgttgcagatgcgtaacatatattccaaaacacgacagctattgcaagcttgcttgcagtaagctgatagggttggggaacatagggcaaaaactaaattgacataatcagcttaatcttcgaatcagtttcaggattctgtttgcacaaagacggatttccttttctgtaagttttccttctttatacgcatcacgaatgtttttatcatcatccggatttcccggcataataatatcatttcctgctgccacacaaacccacggaatacttccatcttccggtactgttgtattccagtcagacatgataactccgtcaaacccccactcttcacgtgcaattcttgtacaaaggtccttgctgtttgctgcatgcacaccattgatcagattataggaagacatgattgcagttggtgcaccctctttcaccgcaatttcaaaacctctgagataaatttctctcaatgttctttctgatatgtgtgcatcaacacccattctgttatcttcctgattattgcatgcaaaatgcttgattgtaacaccacatcccggtctgctctgaactcctctggtcactgctgctgccagtgtgcctgcaaggaatggatcttctgaataatattcaaagtttcttccacacagcggatttctgtgaatattcaatcctggtgcaagccagagattaatatgaaattcttccatctctgccgcaaccttccgtccaaactgttccatcagttttttgttccaggactgtgcaagtgctgttcctaccggaaatgcagtacaatactgatagtaacgttctgcgccctcatggtcttttcttccaacaagataaccattttcaagtgaaccaagcacacctgttccataaactgtatctttctcacggtctacttcataagtttgctgcaggcggattccggccggtccgtctgccatgatcaaagatgggattccgtattgatcaagcagtgcttcactcgtctctcctgctgttcccggcactttaattccagatgctccaagtgtacttctgatttcagacatatttccatacataagtggaatcaaatcttctacaggaatctccgtttcttctggaaatctgcatactttcttttcttctgcctctggttcaaatgatacgttcggaagttcctcaagcagtgctgtccattcttctgcgcgtctgcataattcttctgcacagtctttgatttcaacaacttcactatgatcttccagtttctttgttttctccatcattacatcagcagatacctttacccccgctgaaagttttgcctctgacaagctgtttccaatccatattccataagcacctgcctggattctccactcctgctgctcttccaaaaagcttgcgaacgcctttgcaggaagaacaatattcagcatctctttctctcccggtttcagttcttctgtcttttcatatccgaccagacgacggaattcttttctgcttccatcctgaggaagagaagcataaatctgcacaacttcttttccgctgtatgttgttcctgtgttttctacctcaacagttactgtcacacctttcgaatcagtatttataccgcaaagtcgaatgtcaaattctgtataagacagaccataaccaaatgaaaataatggttcaattccaaagctgtcaaaatagcggtatccaacatagattccttccgcatattcttccgtctcaagatttccgttcaaatagctgaactcctctgctgccggacaatcatcgtagcgttttgtccatgttgttgtcagctttccactcggtgtaaattctccaaacaatatatcagcaactgcatttccaccttcctgtccaagctgggaaatattcaggatcgcacatatattttctgttccagccagcaggtctgtaagttctaccggtccacctgcattaatgatcaatacagttgggattttctgctcattcaggaaatacagatctttttcttcctggtcactcagataataatccccttttctttttcttctgtcctttccttcgccggaaatacggcttataacataaaccgctgcttctgcagacttgatatcttcatttgtcaccgcacggccatccggcatggcaaatggattggcagcataggcatcaaacggattgtctacatgttttgcagcttctaagatctgctccttccactctgctctcgcctgctcatagcggttgtgataatctttcagccactcctcgcttacaatacccgcgtttttctctttcattccggcatatatagatacactttctctgttatttacatctccggaaccagtaccacctttaattgtcttctctgccccaatccccaaaagtgcaatctttgtatctttttttaatggaagcagtccttcgtttttcaacagaacaattccttcttctgctgcctcacgtgcaaacacagcatgatctatttcacgctggcaaacttctgtacttcttgttccactatgtttcaaattcttttccatttacacatctccttaattcaagtcgaacatccgtgagacttggcgcgtgattctggtcagcgaagctgacatattcctatcagaatcactgcgcatcctcgcggagtgtttatctcagtcggagattggactcccactgagacaaatttgctattactcaccacctgaagaggtgggagtcttctcgactgagataaaccaactgtaagaaaaaagctgcccactaaatgacagctttcctccaacaacttaattcttattattcttttactccaccaagagtaactcctgcaatgatatatttagacaacagcaggtatacaataatgatcggcacgattgctactgtgatcatcatgtagattttacccatatcaaagttcatataatccgctccacgaagtgttgcgatcaggatcgggactgtcatcttattctttgactgaatgatcaaagccggaacgaagtaattgttccaggaacctacgaaagtaaagattgcctgaactgcaattgccggcttcatgattggaagaacaatgtggttaaatgtcttaaattctccagatccatctattcttgccgcttctacaagagaaatcggaagggaagactgcagataactgtacatgaaataaaatacagccggtgatgcaattgatggaatgatcaatggaagcagagaatcatacattcccatgttcgtaaccaatttcaggaatcccattgctgtaacctgtgtaggcataacaaggattgccataataaatgtaaatgctacttttttccctttaaaatcataagcataaagtccatatgctgtcagagctgaaaaataggtacataatgctgctgaacaccctgatacgatcaaactgttcaaaataccacggaacatcgggaagcttccgtcattcgctacattttttagatttgtaaagaaatattttcccggcagtgctgagaatcccttctgtagctctgcatgagaacgtgttgcatttataatcaatacatagaagaaaaacagacacataaaagataacagaatcaatacggtatgtgccagtatgctacgtccacgacttgactttgtttttgatttcattatctctttctcctttctgcttttgctcttttcttagctgctttcttagaaccatccggatcgttatcatttgtcatacgatatacaaagaaacagaggattgcacttacgataaacagatatacagaaagtgcaccggccattccatagtttttgctcttcagatgactgttcaggaacatgatcagagtcatggatgttctgttcgggttaccctgtccatttgtcaggatctgaggaacatcgaacatctgaagtccgccaataatggatgtgatcaatgtatatgccaaaattggacgaatcaaaggcagtgtaatatagaagaatctctggatactgttacatccatccaggtcagatgcctcgaagacgtcctgactgattcccatgattgctgccatcaacataatagttgtatttccaaaccacatcaggaagttcataaatccgatcaacgatcttgttccaattacagatccaaggaaatcgaccggttttttcagaattccgattgacatcagaattgagttaatcggtccatttgttgagaacattgtaaagaataacaatgcaaatgcagatgccataatcaggtttggaagataaatgacaactttgaaaaactgctgccctctaatctttaatcggacatcagtgaaccacgctgcaagtaccagcgcgatcacaatctgaggtataaatccgatcacccacagaattaaagtattcactccatatttcagcatatctgaatgaagaagactcacatagtttgccattcctataaaattcggtccaacctctttaattcctgatcggtaatattcaaagaaactataccttactgtatcgatcaacggtatcaatgagaaaataatgtatgctacgaaaaaaggaagaataaatatatatccccattttccataatcaatactttttttctttttcttcataatggttcttcctttccacaatatcttctaacagaacagaggctctgctgtcacagagctccctgcgttagtagctgttcattccagacattattctggccaaacaacctctgtaatgtcaggataacgttctttaattgctgtttcaaagtttgattttgctttctcaaagtcaactttgccctggaagtaatcgctgaatgcgttctggatcaactccacacatccctgatcgtaagcggaaagtggtgcgatcttgatgttttcagcaactggtgcaaagtactggaatgggttctgtccgccaaggaattctgaaccatatgtagcatcatcgtttgctgcttcctgcataccggattttgtatttgtaaagtctgagtaattctgggagatctttaacagattatctttttttgctgtcatagcaaggataatatcttttgcatgttccggattatctgtacctgttgcaacatggatgtaagatcctccccagttgtattcctgcggtgggtttgttactgcccatacgccgtcttctccatcccagttcggtttcaatgtgaaatcaataccccatgccgggaagaggaatgcaaatactttggactgacttcccattgctttgttccagtcatcattccactgaccttttactgtcgggtttaagtaacctgcatccagccattcttttgaatcattaatccactgcatgatcattggatcaactgtaacctttgtgtctccatcttttacccatgaattagaaatgttgtttccatagagacggaatgtatcagcataagaagcaaatgcgtaatatcctttctgcttcaattcttctgctgtctgtttcatagcagcccagtcttttactttttcacctacagcagtcggatcgtctgttccgaatacctcttttgcaatatcacgacggtaaaccattgttcccgggcagcactgccatgtagatcctctctgaaccccgtctgcatcagatgctgttgtttttgtgaagtcgtactgatctgcaagatctttatccggatcaattccaaggtccttcagtggtactgcagtgtctgcttcagcatctgtatatttgtatacataatctgtctctgacaggaagatatctactttatcatctgtatcaacatctgcctgtttcataagtgcctcatcaagtttctgctgataaactccatcctggtttggattgatgatccagtggatctctgttccatctttcaatgttgtaacagttccatctttggatgttgactcaacttcaggatatatagcttccagtctctcacggaactcatcattccaagaataaatgttaattacctttccttcttctgtactggcctctccgccatttccacctttgcttccacagccggcaagtgatccaacagcaactactgttgccataagaatcgcaacaactctctttttcatttataaatcctcctttatctaagcactctgctatgcttttcttgttgttgaactaaatataccatcttttttcctccgattatattatttatcttaacaaaatgtcaaattcatgtcataatataaaaaaggaggttttttatgactttatctaatgaatggtacaatacagaactcgaaaacagcgaattagaaactcttcacagatcaccaactgtagaatattctttctataatgctgtacgctccggcgacatggaagcagtcattaaaaactgttccgaagatgaatttattcgcctggaaggaacgggtgttctatcccgtaatgcgcttactaatataaaataccattttgttgtcaccactgcaatgttgacccgttattgtatcgacggtgggctcgaaccagagcaggcttacagactcagtgacttctatattctgaagatggattcctgcaaaacgatccgtcaggttgctgatcttcaccatgagatggcaaaggattttacaggtaagatgattcttcagaaaaagagttccattttatcaaaacccgttatgcaatgtgttgattatatttacagtcacatcaaagaaagaatcacgattcaggttcttgctgaccacaccggactttccacgaattatctttcacgcattttcaagcagaatctgggagtctctgtcagcgattatatccgtgaacagaagatagaaaaagcaactcatctgctgcgatactcaaacaaatcaattgtagatatcgcaaattatcttgcattttcttcacagagtcacttcatccagacattcgagaactttaccgggctcactccaaagaagtaccgggacaaatactataaaagcatgtggtaaaatcagatttcttcacagaagaattcgcagattttcccacaaaaaatactgtcagaaagcaattctctttctgacagtatttttatctttttaatctgtcgattatactaattcaatttcaatcttatgtgtctctttcactgaaagcatctgaatctctctctttgaaagtattgtacacctttcggctgttatttctaatgcttttccatcgcaagctgctttctggatcttcaactgatcaaattctttcttttctttattatagaatataatctcaaagttccttccggcaaatgtcatcttaagtactgcttttccatcctgattatactgttccggcataagtgcaggtgcgatcttcaagtcaccgcaatctcctttcaccccaaacacttctgtgatcatggtaagcatataccagcttgcagcgcctgtcagatatgcatagaggcctcttccctgattatcaaaatattccggaagtccaggatacatcttactgttatcaaattccattgctgcatctaaaagtgcctgaagtactttatttccttcttttgcaaatcctctctggtacaatgcatttgagtacataacagccatgtgtgagaacactgctccattctctttctcgccataagcaaatccaaacattcttccaagatcaaatttttcctcatggaagtttgtgttcaaacggtatccgccggctttctgatcataaagatacttgtctgcactcctgcagatagattccacctgatcttctgttgccgttccactcataatggcaaatacttgtccggtcagcatcattctcacgctttcatccataacgccttctacttttctgccatggttatcataatagccattgaaccagccatcttctccatccttcacccattcgttggcacggatatttttcatcatccagtctgcttttccctcaagattagcggcaagttgatccaatcttacaacaattgtgtctccactgatattatgttcacacttctttgcgtatcctgcaaggagtgcctgcttacgtgctgcatcttcatacagttccacgcttcctgcaagaagatcttccatctcatgtgcaatttcaatcttgctgcttccactgatttcttccaactgacggagtgtttttgcaatatttctcaaatttccggcataagcacaggtaaatgcaacactttcacccttctcccatgccatgtccagtgcatcattccagtcggcaccatgaagacgcatttcattatgctctcctacatcatagaacgcacacagattctgtaaaagaatatgctccaaaactgttccgaaataaatgtggtctctttctgttttctgcttctgtccatattcgctgttccaaagcttatcatgtgcagtacctctcatagactgcagatctttaaaatacggaaccttttcaaacagaacatccatatctcctgtctgatccagatacagacgagtcgttacaaatggccagaatgcatgatccatccagacacgtgtaatattgtttctgtctgcaataaactcaccctgcttatttccgatgattgtcgcatttgttccatcaattcttactccgccataattatccacgatcatctgacggacgtttgagggatccataatcagaagtgcaaggcaatcctgccagagatctctccagcctcttcctccttttccataatcgtgatatggaaggaaggaacatccataaattcttcttaaaattggctggaaacaaatccatttcagataattgtctgtagcttcatcaccggtttcaaactctacatttactttttctgtccaatactttttcactttggcaagctcgttttccgcctgctccttcgtaccaaatgaagtacagatttttgaaatggaagccttttctcccgttgctccggcaagaacaacatactctattgattcatttgcttttaattttctgcgttcaaacctgaatgccccaacagcctctttcccctccagatggcagcctgcggtacatcccgttttttctacacgtactgcttccggaatcaggaaagaacctccctctccaataaagctttcaacagtcggataaaactccttcggggcatttccttctgctgtaaaaccatatacaaaataagtcgtatcatttttctgatgtccacgctcatcaaaggataatactggtgtaacttctacgccacattctttcgtgtcgattctgtgaagaagtgatgtgacatgtctgtggtcgcggatattatctgcgcttcttccataaaccggaatggcaacgatcggtgttacttcctgttcttcttccgaaagatttgtaatcttgatcagctggatctctgttgtgccatcaatagaaacaaaggatgtgatttctgactgaagatcatatttttttgaagttcttgtcaacttctgccacatcattcctgcttccagagtgctttcatcctgtctgtctgtatatttatcaaactcctgctccgctgaaactccacatgctgaccagtagccttttccttctacccgacaccagaaatttctggtgctgcacggttattgtgaaggttttcaatgctgacaggttcgagaaggaaatgattctggtccgttttactatctccccccaaagttggtgtaatactggatttcagaccttcttctcctgccagtggtaagtaaagtccactataattttccggatttgtaatcgtaaatgttccgtttttatctgtaaaattgatttttctcatgtccaatccctcgtcatttcatttaagaaaggaataattctacctctgttgtctttgttaacttctcctgtggaatataattatctttcatttgttctccatttacgaaaagtttttcacatcctgactctgcatgccccggatttttcacaacgatatgtaaatgtgaacctctgaaatctttttcgatttcaaattcctcccactctttcggtactgacggagcaatcttcaatccatagaagtctggccgcattccgagaattccttctacacatcccaccataaccgtagatgctgttcctgtcagccagtgtacatgagaacggccgaagttcgggctgtgttttccttctgtgaactgtccatagcagtatggttcaagtcttctgatctctgcacgattattctgtgcagccggtgcattttcaataaaatagttaaatgctctctctccgtgtccacgaagcgcctctgcaagaatgatccatccctgagactgtgaaaaaattcctgcattttcctttgttccggcattgtagatcacagccagtgcaccttcaaatgcatgtgcatgatacggaggatccatcaggattgctccatattctgtattcagtttgtcatatacattctgaagtgcaagatctgcctgctcttcatttgcaagtccactgatcacagaccagctctgtgggttcagccacatatttgcctccggatctgtgcgctgtccgatcacttcaccatcctctgtgaagccacggataaagcggtcttcgttccaacagagatcctggatcagtttttccagcttcttctgactttcctccagataattcagatattctgtgtctttcttatactcagcaaattccttcaaaattgtcattgcatagtagaactgtaatgcaacgaaggttgactctccatcttttccgagtcttaagcagtcattccagtcagcataaaggcctgccggcataccatgctttccaagatgattcatggagaaatctactgcacgtttcaaatgctcgtacacggtaccttcttctttatttgcaaacggaatcacttcatcgataaattccagatttcccgtctcggaaatgtatttgtatactgttgggaacagccacagcgcatcatctgcacgataagccgggtgtcctgtctcctgcacataagaagcatcatccggtgtatcctcatgtcccggattgtgtgtgaattttacaagtggaagccctccaccattatttacttgtgcagaaagcatgaagcggatcttctctactgccatctccggtgccagatggatcacaccctggatatcctgtactgtgtcacggtaaccgtatccatttctcagtccacaatatgtaaaggatgcagcacgtgaccagataaatgtcataaagcagttatatgcattccatgtgttgatcattgtattaaattcttcgcttggtgtcttcacctgaaaatgggacagatgtccatgccagtactggatcagttcttccagttcatttctgcagattgtttcacaattctcataacgagacatgattgtttctgcatcagcatcttctttcataccaacaataaatgctatttcttttgtctctcccggatataaagtcaggattgtagctaatgctccacatccattttcattataatttccttcacaatttaaaataccatcttccactccgaccggattgttgtatccatgatatcttccaaggaaaccttccctgcttccacaccaggaatcaacctttgcacctgcaagtccgaagaaacggtcaacaacgatcttgtcatccacatcttttccatcttccagctgatccagattggcatggatcatctggcgcacacggtttccacggaacactgttcttgtaatgaactgagagtactgaagatttacctgatcctgctcgtaattgctgttgtttgtaaattctgcatagcctgttacattgatcttgcgcatgcgatctgaggtatttgtcactgcaagattccacacttcataagactgattcagcggaacatagtatcttacttctgaatggatctggctataatcagccatcatctttgtgtatgctgtaccatgatgacattcgctcttataagaattcaaatcttttcctaccggctgccaggaagctgaccaataatcttcactctcctgatctcttaagtagatatatcttcccggctggtcaaactgattgaagatatatcttaaaattcttccgttcgctcctgattttgcaaagctatatccacctgcattattagaaataattgctccatattctggagatccaagatagttcacccaaggtgccggtgtatccggtcttgtgatcacatattcttttttcgattcgtcaaaaaaaccatatttcatacttcacattctcctatcacacttattataaacaaattgcagcaattcctactatctgcaattctatctttactgtgataaaagaatatcaaatcagaacacattaatatacaaaataagaactcaaaatatcaaattcgtgacatgacaaaaaggacttattttactcccgtatcagctcgcttgtataatatactcatttcatgttaaaatagtatcagctttatatatgaaaggattttctcatgcctggttttattttacatttaactgcagcccagatgctgcgaagccatcttcacgagtaccctgattttccttatccgattcaatctgtaaatgattttctgatcgggaatcttctaccggatgcgacagaccaaaaagagctttcacatttccgtaaccctgtttatcgtgataagatgatggtatttccggatttaacacgttttactgctaaatacgcctctcttctttctgattccagtgttttgggctactattttcatttatatatcgaccgtcggtttttcaaggattttattccggagattgttgatttttatgatgaaaccggacagattacagatataaaagaagagattgtaaccgtttatatcagaaattttcagacttatatcccttttgaaaaatatcttactgaggaatattattatggggactatacaaagatgaatacttatcttgtaaatcgctatcagattccactcgatctgaacgcacagataataaatccagggatcaatgaaattcagtatggaaatgtacagcaagtcctggattcattgcatggatatctcagtgttaccgaagatgcggtaaatgatcttaaagtatttccacttgataagcttcttgcttcacttgaacaatatacgattgaatttttagctaatcctttatagaaaaaactctattatccctgccatattctaatccggaagagataatagagtttcttatttaaatctatatttttttagaactttcaaattattttacgcgatctctgtcgtactctcgaactgagaattatacagatccgcatagaatccgcctcttgtaaggagttcctcatgatttccctgctcaatgatatccccgtctttcataacaaggatcagatctgcatcacggatcgttgataatctgtgggcaataacaaagcttgttcttcccttcatcagattgtccatcgctttctggatcatttcttctgtacgggtatcaactgaacttgtcgcctcatccaaaatcaggatcttcggatctgcaaggattgcccttgcgattgtgaggagctgtttctgtccctgggatacattacttgcttcttcattcagttccatattgtatccacctggaagtgtctggatgaaacgatgcacatgtgccgccttcgctgcctgaatcacttcttcctctgtcgcattcagttttccgtaacggatattgtcactgatcgtaccatggaacagccaggtatcctgcagaaccattccgaacatttcacggagttcacttctattgaagtcccggacatcgtgtccgtcaatcttgatcgaacctccattcacatcatagaaacgcatgagcaatttgatcattgttgtctttccggctcctgtcggaccaacaattgcgatcttctgtccttctttcacatccgctgagaagtcattaatgatgatcttatcttcattatatccaaaacgtacatgctcaaattcaacatttccctgaagattctctacagaaaccggattttctactgtctgatcttcttccggtccttccaggaactcgaagacacgttctgatgctgcagctgttgactgaagcatatttgccacctgtgcgatctgctgcaatggctgtgtaaagttacgtacatactgaataaaggactggatatctccaacctcgatcacatccttaattgtcagatatccgccaaggattgccactgccacgtaacccaagtttcctacaaactgcattacaggcatcatcaaaccggaaaagaactgggatttccatgcggaatcatacagcttatcatttgtttcattgaatacttcaattacttcctcttctttattaaatgccttgatgatgttatgaccaccatagatttcttctacctgtccattcacatttccaaggtatgtctgctgccccacgaaatatttctgtgaatgtttcattacgaatccgatcaatccggcagaaagcggaagaatcaaaactgcaatcactgtcatcagcgggctgattgacaacatcatgataaatacaccaatcagagttgtaaccgatgtgatcatctgagtcgcactctggttcaggctctgtccaagtgtgtcaacatcatttgtcacacgggaaagcacttcacctaccggctttgtgtcaaaatagctcatcggcatgcggttgatcttctcggagatttctcttctcaaacggtaggttgtcttctgagacacccccgtcatcaaatatccctgcacaaaactgcagattgcgctgatcacatacaggcaaagaacagtcagcagaatctgtccgattttaccgaaattcattccgtctccaccggaaactttacttacaagtccattgaaaatctctgtcgttgcttttcctaaaatcttcggtccgacaatattgaatatcgttccacagatagcaaacacggctacgaaaaatacctgtactttgtaaattgccatgtagcggatcagtttcttcattgttcctttgaagtcttttgctttttcattcggtcttcgaccgccatgcattctagccatgaatctgatcctcctttccatctgtctgctcatttaacgctgcttctaactctttcctggacagctgggattctgcgatttcacggtataccggacagttcttgagaagctccgcatgagttcccttacctgccactttgccttcgtccaatactataatttgctctgcatgcaggatcgtgctgattctctgtgcaacgatcagcaccgtacttccgcttgtcttttcagccaacgcacggcggagtgttacatccgtcttatagtcaagggcagaaaaactgtcgtcaaaaataaatacctgcgggtgcttcgcgattgctcttgcaatagaaagtctctgcttctgtccaccggatacattcgaacctccttgtgaaatcgggctcttatatttctccggttttgtgtcaataaattctgttgcctgtgcaatctctgccgcctcgatcatctcatcatcgcttccatgtgaattaccaaacatgatattagatgcgatatctcccgagaacagaactcccttctgcggaacatatccaagcttctcacgaagttcatgctgtttcacttcacgaatatctacaccatccagcgtaatatctccggatgtcacatcatagaaacgtggaatcagatttaccagcgtagacttaccgcttccggtacttccgataatcgctgttgtctcacccggcttcgctgtaaatgtaatatcttccagaacatcttcatctgcacctggataacggaaagatacatgatcgaaagtaagtactccttttccgtcttttgggaaatgtttttcttgctttggatcgtggatcattgtctcactcttcaatacttcctcaacacggtctgctgccacagctgctcttggaagcataattgaaatcatacaaagcattaagaatcccataatgatctgcatcgtatattggataaatgccatcatatctccaacctgcatctgtccatcactgattccatgtgctcctgtccatacgatcagaacagatacaccgttcatgactaacatcatcaccggcatcataaatgtcattgcacggttgacgaaaagattcgtcttcgtcagtgtgcggttcgcatcatcaaatctctcttcctcatgcttctctgtactgaatgcacggataaccggaagtcctgtcagaatctctcttgttacaaggttcaacttgtcaacaagattctgcagcactttgaactttggcataacaacaaggaacagcaacaaaactacaaatgcaatgataataaccgcaagtccgatgatccaggacatggatacattcgtcttcataacctgcagcactccaccgattgcaaggattggcgcatacagaaccatacgaagcagcataacgatcagcatctgaatctgctggatatcattcgtacttctcgtgatcaaagatgctgttgagaagtgattgaactcgttgtttgaaaatccaacaaccttatggaatactccacttctcagatcacgtcctgcacttgctccaactcttgatgccagaaatgcaaccataatacttgctagcattccaaaaagagcaagtgcagccatctgacctcctgtttttaacagataatgaatctgtgtctgatccatgtccattccaaggtctttatatgcactcctgcagaagctcactgatgcctgatcaagaattgtatccggcatctctgacatctgctcttcaatcttctcaaccattgttgctctctgctcagccggaagcattttcagaagatcaaacatagacatgtcatccagtgacactgcctgggattccgcctgagattcaccttgtggcattccttccggcattgtccggtctgccccttgtggcatgctctgcgccattccctgggacatctgctctttcagcttgtcttccatctgttttgttgtatcacttccggactcgattccggatgtcatcatcattggaatctgaagaatatctttcagattctccatcgtattttcctcttcagcaacagaatctttcaagacataagcttcttttttataagaagtattatcttctgtatatgcatccatcaccgtctgttgatcgtcttccgatacaaacaaaagcaatttttccatttcttctgttgcaatctgtctcggtacttcatcttcaataccgccctgctggattcctacatttacaatatctgatgtgtaggccggcaaggacagatcacaatacgcctgcacaaccagaatcagcacgatcgcaatcatagctttccagtacgatgcagcgtatttgaataagttcttcataatctgcgtatttcctttcctggtaattctctgttactgttcgcaatatgtgtaagcaacaacaactctcttcaagttacacaatttatcactaaccgctgattctcagcgacagtaatctacttcattcactactccacattctctataatctgcaggagcagccggcgaaaaagcatcttctcttccacgctcattccttcaaacactttttcttccagtttctcagctgtcttgatcacataagcaatgctgtctctccctttctgtgcaagagtcaggcgcatcactctctggtcctgttcatcggcttttcttgtaatgtaaccttcctgttccatcttcttgatcatcgatgtaattgacggcggcgttacattcaggcgcttcgcaagttctttctgagacatggaatcttcctgatgaagggcaaataagatccctgactgggctctgttcaaatcgtattctgcatacaattcctgtgctctctttccgatcaggcgcatactctgtcccatcaatccaagtaatggggcatcctctttatgacacttcacgttcttttccctccttgatttattgatacattctacaaaaaaattctgactatccctttttccacagaatgaatagtgaaaattagttagttaattaactaaatgaaaatatagtacttttcacaaagtaagtcaatattatttctgttttttcacattttcttaatactttttgcacacaaacaagttagatagttaattaaattcaatatataaaaatgatgaaaccaaatggctgacaccatctgatttcatcactccatcttaaaactcgttactgttcacacgatgtgcgaccagcaacgcatctcgccattttaaatcgcctttggcgatggggcgagatgcattcaagccaaaacatgcatcctccgtgtcaatcagcgaagtgattgacacgggagtgaacaataactaaaactctttctttttcatgactctcatactgtaaatataagaaatgaaccatacaagcaagctcagcacgataagtgcaatcgcaatttcaaaatcgcctatcccttctatcatatacaaaatactttcttttaatcccaggttatccatcacaaaagagccaattgcataacaaattgcaaaaacaattaaaattgcaattggtagcactaatcgtcctttctctccttcaaaccttaaccgaattgcaatcgtaattcccgcaattgcctgaaatacaaagattgtgatcaactccattgccagcgtttccggatcaaacacttcttctggctttatgagtacagtgattcctgcacagattactccaatacaccatccacacgctgtcataataaaggaaaaaatatatttttctctaacatatacttttctatttacaggtaaagaaaataaatacatatatccatgattgttttcatcataactaattgtattccccgcatatactgctataacagatgggatatagattgcaataaaagtagctgtcttcttttccgtcagcgtaaaaaataacgccacaaacgctaacacacaaaaaagattgccaccttgccgaaaaaacaaccgaaaatccttttccaaaagtcctctgattcctttcatcacatcccgcctcctgtcaacatcagaatcacctgatcgagtgatccgctttccactacaatttccggataattttctgtataatactgcttctcatttgtcagacaggcaattccgaaattttcttttctctctttcaggatatagtttttgtctaaagcctgatactgttcctcgctgactttcaacatggcatacttttcaagaattctatccatctcttcatgaagtacgatctttcctttatgaatcacataaatatcatcacacagatgctctaagtctgaagatatatgtgaactgatcaggatacttctctccggttcttcttccatatatgttctcaaaatatccagcatcccttctcttgctccaacatcaagaccggctgtcggctcatccagcatcaggaaatctgcctgatgcgtcaatgcaatgatcagattcagctttgctttcattccagttgaatactcttttaagaatttatccagtggaatctgatatctttcacacatctgaagaaatttatcttcttcaaactttggatacaatttagcaagaactgcctcaacatcttttcctttcaaatatccgctgaaccctgcttctgccaggactactcccatctgttctttctctttctcgtttaactcttgcggtttttttccaagaatctttatctcgccaccatcataggaaatgagtcctagcactgccttgaacacggtactcttaccggctccgttctctccaaccagtcctgtaatccttcctttttctacatttagcgaacagtctaactgaaattcgccgtagcttttctttacccctttgatttctaacataattattcatcctccatgatgagttcaaacaaggaacggatctcttcctctttcattccgcagcgccttcccttctgaatcgccgcttccagatccgcctcaacttctttcctgcgctcttcttccatcaactgtgtattcgaagctgcaacataagttccttttccatgaaccgtgaccgtcatgccctccgcttccagattgtcatatgccttcttcacggtaagtgcactgatcttcagttcctttgccatcgttctcactgacggcaatatatcattttcttttaattctccggagatgatctgcgccttgatctgctccatgatttgttcatagatcggtaccattgatgaattattgattataatcttcataagcaacctcctgttgtaaacagtatataacagtgtatcactgttgtcaactgttatatactgtttgttttttcaattttcagggcattgttttattgtattactccgttatccaatatccccagcatattgtaaatcattttctttcttaaaacataaaagaagtttccgatacaagtttttcatcttatatcagaaacttctttcttcatttgctctatttcattataaccttgcaatgtttcttattactaaaaaatcgccacagcctcattcacactcttcacacccagcagcttgattcccttaacatccttcaccgtcttcatgcacacttccggaaggatacacgtctcgaatccaagcttcttcgcctcagccacccgctgctccggcatattcaccgcacgtacctcaccactcagaccaacctcaccgaacacgatcgttttttcatcaatcggacgattccggtaacttgacacaagtgccatcacgattccgagatcgattgccggctcattcatcttgattccgcccgcaatatttacataagcatcgcaatttccaagattcataccaagtcgtttttcaagtactgccatcagaagattcaccctattataatctgttcctgctgcagttcttctcggcataccaaagttcgttcttgcaactagtgcctgaatctccagaagaattgggcgtgttccctccatcgaacaggctacaacagaaccggatgcattctccggttttccactcagcatatattcggatggattctctacttctacaagtccattctgtctcatctcaaagacaccgatctcattcgtagagccaaaacgattcttcacggctctgaggattcggtaagatgcatgacgatctccttcaaaataaagtaccgtatccaccatatgttccagcacacgcggaccagccacggttccttcttttgtcacatggccaacaatgaagattgggatacatagtcccttcgccagctgcataaatacattcgtagactcacggacctgggagacacttcccggtgcggaattcacatcttcactgtacatcgtctggatggaatcaatgatcacaagctccggcttctctttctcgatcacgctgcggataatccccagattcgtctcacacaaaagcaacagattctggctgaattcacccatacggtttgcacgaagcttgatctgagtctgagactcttcacctgaaatatataaaatcttctgctgcttcgccatcctctggcagacttgcaagagcaaagttgattttccaattcccggatctcctcctaccagaacgagtgaccccggcacgatcccaccaccaagaaccctgtctaattctttaattccagtcttattccttgtatcatcatccgcggaaacgtctgtgattggaaccactttcgcttcattcaccgctctggctgctaccgtcgttcctttcgtgatgccactgtcaattctctcctcgacaaatgtattccattccttacacattggacactgaccgagccacttcgcttcctcatgcccacaattctgacagaagtaaactgttttctttccttttgccattcataatttcctttctgttcgaagcaagcgtaatacagcttgccaggtttatagattagaaaagggaaaggcgcatcttgcaattcctttccctctgtttttacactactcttgtttctatccgaatctgactgattagcatttgacaactttgattgcagcactctgatctgcgttaagttcaacacttacacttaattttccgcttaagtttgttcccatcttacctgcagactctccggcgataaatacttcatattcgctctctggctcaagttccaatgtaaactgtacgtcttccggtgcggaaacggtgaactcaacttctgtttctgtctctttgaagttctctactgtacttcccggaacagactcataaacgaacattccatttttctccagctttgtaatctccgcaaatgtctttactttataaagatctcctttaaattcaaatccgtccttctttgtcttggatgcaagagtgtaatctccaaagcttaatgttccgtcgttctctgcacgcaataattctttcactgttgccatttttaatttcctcctgggtatatatatgttcctattatatactacttaaaatagtttttctatagattttatttattcttcacatttacaattcgatgtgattttaagattctgtcttcacaaaatgaattccctttttggatgctcctgctgccacatgatccccttcctgaatctctccgttcaggatcgcatctgccagcttatcctccagttctgtctgcaatgcacggcgcagtggtcttgctccgtacttcgcatccgttcctttctccacaatgagagccttcgcagattcacgcagtttcagatgaatattcatctgtgattccagacgtttagtaaactgattgcataacaaagaaacgattttctccatctcttctttgccgagtgaatggaatacaataatctcatcaattcggttcaggaattccggacggaagatctgtttcacttcgtccatcacattctgcttcatcttcttataatcactcgccggatcttcttttgtcgcaaacccaagtttcttcggttcaacaattgcttttgcaccggcattggaagtcatgatgatcactgtattggagaaatcgacctttcttccctgagaatctgtaatatgcccatcatccagcacctgaagaagtacattgaatacatccggatgtgctttctcaatctcatcaaacagaatcacggaatatggatgtgtacgcacctggtcactgagttgtccaccttcttcatgaccgacatatcccggaggggatccgatcatcttagaaacagaatgtttctccatatattctgacatgtcaacacggatcattgcatcttctttcccaaataacgcttctgccagtgctttcgataattctgtcttaccaacaccggttggcccgaggaacaagaaggaaccgatcgggcgcttcggatctttcagtcctactcttcctctcttcacggctcgtgcaactgcgccgacagcctcgtcctgtccgatcactctcttctgaaggacatgctccagattcttcagacgctgggcatcactctctgcgagcttgcttaccggtacttttgtccatgcagacaccacttctgcaaccacatctacagttaccggcgggttcgccttcgcctgtttcttctcaaagcgtttcttcactgagtctaatttcttctgcactgcatcctgttctttctgaatcagagacgcttccgcaaaatctccccgttcaatgctctcttccttctgcgaagcaagctctttcactgcctgttctaactgcttcagattctctggaacctcatatcccttcagacttacctttgagcatgcttcatccaaaacatcgatagccttatccggaagattccggtctgtaatgtaacgctctgacagctgtacagctgactccagtgcctgttcttcaatcacaactttatgatgcgcttcgtatttctctttcaggccttttaagatctcaacacactgctcctgtgtcggctcttcgatcgtcaccggctggaatcttcgctcaagtgctgcatctttctcaatgtacttccgatattctgcaatcgtagttgcaccgatcagctgcatctcacctctcgccagtgaaggtttcagaatgctggatgcatcaatcgctccttctgcgcctccggcaccgatcatcgtatggatctcatcaaggaacagaattacatttccacaggcttctacttctgagatcaggcctttcatacgctcttcaaactcaccacggtactttgaaccagcgatcagtcccggaagatccagactataaatcttcttatctttcatcttctccggaaccacaccggatgcgattctctgtgctaaaccttcaataattgctgtcttaccgactcccggttctccaaccagacatgggttgttctttgttcttcggcttaaaatctccatcagacggtaaatttcctggtttcttcccacaaccggatccatttttccttctgccgcacattctgtcagatccgtacagtactgctccatcatcgcaccgcttccgcgattatcctcctgaagttcttcctgatagatcttcggatcgatccctgctgcattcataatgctctggaatagtttctgaagattcacattcaatgtgatcagaatctttgttgccacacaatccacatcacggatcatcgcaagaaggagatgttctgttccgatttccgttgtacggagtcttttacactccttcgcgctgttctctaacagatactggagtctcggactctcttctaatttctttcctttggctgccggatgttcttctgccggagtgatcagctcatccatcagcttcaggatcttctccgactctactccactgttcgcaagtacctgtcctgccactcctgtatattcttctctcaatgccagaagcaaatgttctgttccgatatacggatgcttcatctctctggcagctttagccgcatacttaagcgcatgctgcgccggctttgtatatgaaatctgcatatatgtctcccttatgtctttctacttctctgctaccggttctcgtgcagctcatattcgtcaaaaatctcatctaccagctcatgaacctcctgccgtgagatgttcttgcaacgccctcgcgcaagtacgatccttaactgctctttcatcacttcgagctgctgaagtttatctacatcaaccgcgatcactgcgcctctgcgtttatccagactgatatatccttcccgcttcaacacatgatacgctttgttcacagtatgcatattcactccaaccgtatctgcaagctgtctgacagatgggagtgaatccccttcctgaatatctgacatagcaataccaagaatgatctggttacacaattgaatgtaaatcgcctcatcactgttgaaatcaacttctatcagcatacgcgtagcccctttctctttcgtgtaaaacatatcttctgtaaaatcagccgcaggagatattttccacttgttatatccatcctagcacaacctcttgtttgattcaagcaaaaacgcagaagaaaaggaaggttttcttcctcttctcctgcgtaaagcatcactattttatttctcaggaaatacaatttccattcttgttccttttccgtactcactatccacctgaacttttgccccatgcagaattgctccatgcttcacgatcgacagtccaagtcctgttccaccccgttctttcgaatggctcttgtcaactctgtagaatcgttcaaagattctatcctgatgttcttttggaattccgattcctgtatcactcacgcggactttcggtccttccagtgtatttcctacccaaatggttacatttccattttctttattatactttacagcattttctgtaatattatagatcatttcatccagaatctgacggattccatgtattttcacagattctcctgtcagttccatatgaatattccgctgagccgcagtaagagaaagacgactgacaatttctctcgtcagttcaaataaatctacatcttctttctcaagctcaacagattcgtcatctagctttgatatcttaataatatcttcgattaaggtcagaagtctgcgtgcctccttataaatagtctcagagaatcttgggatatcctccggacgtaccagtccattcatcatgatctctgcgtatccggaaatcgaagtgagcggagttttcagctcatgggatacatttgcagagaattctttacgcatattggccacagcttctttttctttattctgcttatccatagcttccaaaagcggggtcatctcctcatatacaacattatccaatgggttttccaaatccagatgaattacaggttccatcagtctgtttgtctgccattttgcaagaaaccaggcaagtacaagtccaatgattccaatccctataaccaccggcaaaatatttaatgaagtccacatcaaactatccattgattttgaaacacgaagaacgttcccatcatccagaagaaccgcataataatacaattcttttcttacggtatctgacatacggatcttctcgcctgtcccattcttcaaagcctgctgtacttcggctctggtcttatgattctccattgtacttccatcatttctggaatcatacagaacctctcccgtagatgcgatcagcgtcacccgcgttccctgatccacatcatccagctgtgcaagatactctgttcctgacagatcgactgcccgtttgatatacgatgcctcctgtttgatctcaccctcaaggatcttcaggttccgctgatacacaccaacagacatgatcagatatatcggaactaaaattgcaatcagtataaacatcatgcttttctgaattcgttttctcactttctcatatcctccagacttgtattacgcttctccaccgatccgatatccaacaccacgaaccgtcttgaccaaactgccctgctcacctaacttctggcgaagcgtccggatatgaacatcaaccgttcttgtctctccatcaaaatcatagccccagatctctgtcagaagctggtctcttgtcagcacaattccctgattgcgcatcagtttctcaagtaactcaaactctttcaatgtcagtacgacactctctccgtctacttttacttcatgtttcttcgtatctaagcagattcctccaacagaaagtttcgtcttatcctgctgctttccacttctacgaagcactgctttgattctggagatcagctccatcataccgaatggttttgtcacgtaatcatccgcaccggaatccagtcccactaccttatcatactctgaccccttcgctgtcaccatgatcacagggatatcctttgtctttgatgaatttttcagtttcttaagaatctcaagtccatcttcccccggaagcataatatcaagcaaaacaagctctggcgtgtcaaacgccaaagcctccataaatgccgtcccgtctgcaaatcctctggcttccagaccggttgtctccagagtgtagattacaagttcgcgaatgttatcgtcatcttctacacaaaaaatcatatatttcgttctccctcctgatgcatcacagaactatccttatgtactccggtaattgaaaattctacccactcggcaatatttgtcgcatgatctccaattcgctcaagatattttgtcaccatgatcagatcaaagatttttcttccatcacggctgtcagcctcacggatcaactgaatcatctgatctcggatctcatcaaaataatcatcgatctcatcatcatctttcataactgtacgggcaagttcaagatctttttcaacatatgctgttacactgttgcgtaccatcttgcttactcctgttgccattgctgtcagcttatcaagattctcctccatcttttcccacttggaagaaatgatgatctctgcaatatcagaagtctgatctccgatacgttccatatctgtgatcatcttaagtgctgctgagattcttctaagatctcttgcaaccggctgctgctgaagcaaaagtttcagacaaagtctctcgatatctttttcaatctgatcgatctcttcatcttccttgatcacaacctgagcctgttctgtgttgccgtcctttaacgcctgtgttacctttgtaattgctgcttcacacaattcacccatatgtgtaagctgtgtatccaatgtatgaagctgcatatcatatctgtaccgcataaatcaaccaaacctccctgtgatgtaatcctcagttctcttatcctcaggaatggagaacaatttttcagtgtcattatattcaatcacttctcctaagaggaaaaatgctgtgttatccgatacacggacagcctgctgcatattatgcgttaccataacgatagtataatcttttttcagttccatcgcaaggtcttcaatcttagatgttgagattggatccagtgcggatgtcggctcatccatcagaattacttcgggctcaactgccagtgttcttgcgatacaaagtctctgctgctgtccaccggaaagtccgagcgcacttttattcagacgatctttgagttcatcccaaatcgctgcctggcgaaggcttcgctcaacgatctcatccagctgagattttttcttgattccggaaattctcggtccataagccacattgtcatacacactctttggaaatggatttggctgctgaaataccattccaacacgatgacgcagtgtgatctcgtccatttccttgaaaatatccttgccgtcgagcagaacatttccatcaatcttacaattttccaccagatcattcatacggttcagtgtcttcagaaatgtagattttccacatccggaaggtccgataaatgcagtgatcttattcgcctcgatcttcatattcacatctttgagtgcatggaagtctccataatgaagattcagatggctgatatcaaatttataatcatttgctttttttgcttccatttttattaattatcctttccacatgccagtcaacgaaatgattgacatagaaattatcagttagctttctctttcattttctgtctttagtttcctgaattcttcttattaatgtgtcgactcaatgcatttgcaccaatgctgaacagtagaacaagaatcatcaggattgctgctgacaggtttgcaaggttcggatcctgtccattgatctgaagtccccagatctgcaaggacaatgtctctgccggacggaaaatattcagtgggcaggtcggtgatgtcagattccagttattccaacgcagatctgttcctgatcctgttgtatacagaagtgctgccgcctcaccaaatcctcttccggctgccaaaataacacctgtcataattcttggaatacacgccgggatcaacacatgataaatggactgccatcttgttgctccaagtccaagacttgcctgcagataatgtcccggcagaccattgatcgcgtcttctgtcgttgttgtgataaccggaattgccagaatggaaatggacaatgctcctgcaagaagactctttccaagtccgaaaaatacaaggaataccagatatccgaacagtccgacaacaatggatggaagggaagaaagtgtctcaatacaaattctcagaaattttgtaagaaatcctttcttcgcatacattgccagatagattccggctgtcactccaagcggaatggagaataacagcgaaataaataccagataaattgtattgaacaactggtttccgatgcttccttttctcgcaaaggcaaacatctccggtgttgctcctgtaaatcccttgataattacataagatgcaaatccaatcaataatgtaaagaagaacactgcgatcagataaaacacgccggtcattatttgatttattcctcgcgtacgttgcactcgattcatctatttgctcccccttactctttgtctttcttcggtcttgagaaataatggatcagcaggatgaataacagagataataagaacaataacaatgccattgtccagagtgctgtcttcatctcaccaccctcagttgcatttcccatctgcgctgcaatttctgtagtcaaactctttgttgtggagaataatccctttggaagagctgttgtctgtccaattaccattgcaaccgcaagtgcctcaccgaatgctctcgcaagtccgagaataattcctgaaagaattcctgaacctgctgccggaatgacaactttataaatggactgccatcttgtagaacccagtccgtaggctgccatacggtaatcttttggcacagaatgaatggaatctgccgccacattactgatggttgggaagatcatcagtgccaaaacaatccctgccgcaagaactgaatgtccaacctgtaaatgaaatactttcttaattgccggaatcaggaccgtaagtccaacccatccataaacaactgatggaattcctgcgaaaatttcaacgattggtctgtaaaacttttctccgaatttcggcgcgatctcaatcataaagattgcagaacctactgcaaatggagtcgcgatcagaagtgccagaccacatgtacacagagaacccacgataaagatcaatgctccgacagttccaccaccctgtgcattatcttccgggttccagtctgtcgatcctaagaattcaaatatggaatgaccaaatatcgtaaatgtaccggatcccttgtatataagaaaggctccgatacagattgtgatggcaataacaagcaaaccgcccgctgtcatcagtcctctccatgcatactcttttgtaaacatgttttgtttcttcatattttcaccttttatcagtgaaatgtactgctgttctgaattttccaggaacacacagtacatttcgtagctcttcactttatgctattaggttactgttcacacgatgtgcgaccagcaacgctattaatgctctgttacagtcatcttagatgcaacaccataaccaagtttctccatctgagcgccatattcatcacctgtgatataatcaaggaatgcttttgtcacttcatttggttcaccctttgtgtacatatgctcgaatgtccatacaggatattttccgctgtaagtattctcaagtgttggctcaacatcatcaattgctactgtctcaacacctgcatctcctgtcagataagaaagtgctacataaccgattgctccgtttgtactcttcacatttgtaagaagaactccggaatcatctgtttccatggatgtgttagaagcttcttcgtttccgtccagtgcatatttctggaatgttgctcttgttcctgaagactcaggacgtgttacaagaacgatattctcatccggtcctccaacatctttccagtttgttgtctttcctgtgaagatggagatcaactgctcttttgtcagactcttaacacctgcttctgcaacatctttgtttacgatcggtgccatagttacaacacatacctgatgatctacaagctcttttgctgctgtctcatccagtttatcttctgctgccacatcagagttaccgatatctacagttccttctgatacctgcttcagtccttctcctgaaccacctgcatcgattgtgatagatacatccggatgatcatttaagaacgaatctgctgcatcatcagcaagtggtttcagtgctgatgaacctgctgctgtgattgttccgcttaatgagctgtcactgctctctgtatttgtacctgctgcattatctgaagttccgtttgatgaacttccacatccaactgccattgtggctgtcatacctgctactgtaagtaatgcgataaactttttcattttcatgtgaattatctcctttacatttcatacacatttctaatcccgctgcattttcttttttattttctacagccatttgtgcttccctcaagcacagtacatatgttacgtaagaaatgtaaagtctgaaatcaaccaaacgttaagtttatgtaaaacaacaacaggtgttttttcggatttgtgcagatccctggcggagcgtttttatatattaggaaagaactttcctaatatataaaaaaagagaggtctctcaacctctctcacaaatcatctctttatctgaagcaaacacataagaactacacccagaatcagaccaccaagaaaacagacaatatacccaagaaccaccttccgatttcccctttcacagcttgtcttcctgatgtcattatatgaagcttcctgcgaaaatattccttctaatcttcgagtgttccccttgcccaacgaatcagccatagaatactccaagtcagcaacactcccatgatcacaccgacaatattgattcctgcttcatcccactgacagtgtcttcctacgatcagaaccttgtgtgcctcatccgcaattgccaggatcgtacaaagtccgaataccgcacacgccgctttccaggctttcatcacattcttcattgccaaaaccaataatcctgattctatgaaataaacgataaagtgtgcccattttctcagatacatgtgcacaccgtccacactgtcctgtggaaaaaagtgctgttggatccattctgccatcggcagactggttgctgctgtctgtggtccattctggcttgacaaaaccaaaagaaggatcagccagatgattgccggcaaaaacgagatcatcgtcagcttcctgttcttctctctattcgttttcttattgctcttcaaaaatctactcctaactgatatactgcttttcttttttgctcattataccatgtagaaatactttgtcaaattttagtttcttaccttacttatacgttaaacaagtagttcgcaatcccatacatctactccactgtcctggaacacgccatgcagacgttcatgcagctgctcctttgtcacatctttctttagaatcacctgaatgaatccgcctccaccggctcctgatataaacttcccatctaccaggtcttcacatacaagaaggatctgatcgatacaggtattggttgtaccggcatccaacatacaggataatttccaatgttggtttaaaagctcagcaaattcgtcaatatctccctgctccagcgcaaaacgcattaacacggcgattgccttcatctcctttaatgccttcaatgactctggtctgcttccgatatagccaccaactacatcacgcagcagatttcttgcaagacgtctctgaccagtatagaccaatgcaaaacgttctttcagttctttctttccctcttccggcatctctatcttctctacaacaagattctgggcaatccccggttttgttgagatcagtttaattccttctgtcagtccgccaacctgatcctgccagccgcctccggtactcatgatctgctccataccaaggacaacatcatagatctctgcatctgtacgctcctgaccaaggaattcaaagattccctttacgcacgctcctgataagatactgcttgttccaagtcctgatcctttcggtactccgtaaacctgggtagaaagatagattcctcctcccatccgctttaagatctcctgaagatctgcttcttccttgaccgggataattccacaggcgatcaaagctgctttatgcagtgcaaatgaatcatatggattatgacaatcctggatctcagctgcactgtctacagttgtatagactccgatatccttactttcaaattccacatgaagctcatctaatctctttactgtgatctgtaccggatagattcctcttaatttcattgcagcattaagaactactccacccttttcattacaatgtggtggtgtatccgtccagcctccgccccagttcacgcggaccggaagggcgatatcaacctgatcttttacaattctatatcctgcactatctggaagcttcttctctgcttcttcataaattgcctcctggattgttccaaaacaatcattttcgagtgcatcataatgcagatcatcataaatcgttcttgtctttttcatataacaggaaactgcatgatagattcggatcttcaatgagaaacctgcttcttccgcatcttcaatcagcaacttaaagatttctttcgatattccacgctttccaaatatcttgagtgcatccgcataatacattccctgctccagttttctgatgaaacactttgcaagaatacggttttcaagaaacctctcctgatcacaggatgcctcaatatctgctgcattaaaactggaatatagactcatgcgttcactctcgcgccatctggaaatctcttcttctgttgcagtaccatgtgccatcttgtaaatgatttcagccatatcaagggcatcttcccagtcatcacacaccggataaagatctgcaaaccacagataggtctcttctcctttccagagttcttctttcatcacttcattctgagtcataaactgattcaatgtcgtgccgagaaatgaaacctctcccggatattttcccttcggattatctggtacaccataaattctgattacttttttcccacctgtcagttcgattccgtgcataacaatctgttccggaatcttccggtccataatacgcacatgcgaaagaacggttccgtcgccgacctcagaattaccaagaatataacaattctccagatatgcttcttttcctatcttcgcacggcttcctacataagcattatgcgctgcaaatccttctttttgcactgctgaattcacctgcatcttccaatccaggaactcgtaatcctgcacatcttttgttacaagacttctcaattcccttgttgttccgaaatgaataaattccgccggtgacagacacaacagcttcattgagaaatgatggatcgcattccaaatctgtgtcctacattcatgcagtgcttcattgagctgtccttctgctgcctctttatagaaatcttctaatgtagaatcatttgcaagcggatataaaaaatccccataaaagctgatccttgcttcttcattacaaaactgccggaatttcttctcgtccaccttgccctctgttgaaatcagacggaacagtgcctgcaacaatgcgctgccaaacaataccgcacctgtatcaaggtctacatttcctgctttattaacagctcccatctctcgcaaacgctcttctgtctgtttatgaagaaaacactttacataatcatgtccatcgttcagaaatacgccatgattctttcctgtagctaccggctctttaatggaaattgctgctgctccgtcaagctgcgcatcgatctgaagcggattaaacaggagcaatacatcacctgacaaaacaagcattccctcctggatcctggatggaactcctgacattcctacaataaactcatcaaataaagtggaacttcttccatccggcaattctcttggaaccggtgagaaaagcttgccgatcgcagaatactgcggcactctcttgctgtcaccacctgaatgaatcacaagaattctacgattcttaaaaggattctctctctcaggctcctgttctgcaatataacgcatcacctgaaaggtagcgcctccggatcccacacgttttccctccggatctggaagaaccgcatacgttgtctcttccggaagaagacctttttccagacggttctcgatctgattccgataagccgttgcctgtgctttatttgatgctgtcaatataatataatcccatttaataaagctttttttctttaaacttctttcataatcttcccaggaatctagataggactgacgtaggaagagattgttcatcttctcgtatttcattttcttactccttatctaaccttttcttttttcttatcttagttaaacattcaaataacatccaatgctaggataacacacattttataaaattgaaagtaattgcaacccgagtagacgtttttcatatacaaaaaagagctgtaaaaaacgagattatcctctatttctcacaactcttttcaaaaatcagtttaactccagctcttactgctgtgtaaaatcattattcgctgtcggcgctactgcgctttcctgagcactgatcgactgaactgtctcagaaggtgtatacgtttctgtcggatacaaaaatgtatgcatctgtgtactcatgtcattcaatgtaaccggaacttcatagaacacaccatcaatcttaccggaatagaatacctttggaaatgcatccattgcttccaccttgtattctgtgattttacttaaaagacgaagtacttcgctctctaaatagtttgtattaattttatcaagcatgctcttggcaatatcgatctttttcgctttatcaagctcctgtgcttttgagaaaatcttaaagagaactgttctctgtctttcacttctcttataatctcctccttctgtataacggatacggctaaatgcaaccgcctgtgttccgtctaatgtataagtacctgcttctgtaatgtgtgcagaagatgttcccctgattccattaagctcatcaatataaccattgatatactttgtttcttcttctgtaatatcctgctcgattccatccatatcatcaaccagttctgctacattcatgaagttaactgtaatatatttctgaatatccagatcaaagtttgtatttaatgtatccattgcaagctccggacctccgaaagagtgtgcatgagtgatcttatccagaccatgaccttcaatctgtacataacaatctctatagacagaagcaatatacacttttttatttgtattatctacatttaccaccatcagggagtctgatcttgttcccttaccaagattattttccctggagtcaactccaaaaatagcaaatgtctcctgattcacttccggctcttcttctacttcttctggctcttcttcctcttgcactacctgatttgtctctttctttggctcttccttttctttcttctttccgcaaccggaaaaagaagcaactgcaagtgcaacaatcaaaagaactgcaagtattcttctctttttcacctgaattttcctccttctctctgtcttatctccatatttgcacaaaatggctatgtttctttaacaaacacagccattttagcacactttaatttagaatgctatagaaaatcctcagttctcgtccgaaaacgattctttctaatatttttcaccgattttctcacccatctttatcaatgtctctgcaccggttgcactgtttctcaccagatcttcatccgtctgcacttttcccggttctgtcaaaagaacgactgtagacccgccaaactcgaacattcctttttcttctccccggtgtacaacagatactttctttttatgattcttaatccgtccaaccataagagcaccgacttccatctgcaaaacggttcccagttcttctgtctgtacaagacaatattcccttgtattcatcttgtaaatcggagcatagtcatttgccaccggatttactgtatggaatactcctctgatctttcgctgtgcagatttcacaccatctgccacataacaatatctgtgatagtcatctaccgtgagacggattatataagctgttccaccttcatagcgtttcgcaagcttttcatccttcagaagactacggactgtatactgtgtctgtttgatgagaaaaagtccatccctttgaatcggacaaactgtcactttcccgtcacaaggactgatcagtacttcttttcttccatcaatcggacgttcctccgctaaaatcttacgcgtaaaaaagtcattataagaagaataatgattcttctcatagattgacagatcaatctgattctttctgacaaacgatggaatcaacagcctggacactctgctgtccagcacttttccgccaagtcgggataccctgaaaccaagcaatggtttcagcatcattcttgtcaatgtatgtccatagatatattccaggaatctgtcctgtcctgttgttttctccgtcctgtttccgtttctgtctgcataaatcataatctctcctcttacatgaatcttcgtctcaatgtccagactactgcaaccgctactactccgactaatgcagaaagtgtcttattccccggcttttttaatttgaaatccgtaataaacaggagtcctacaagaagaaccatcgcatgcagtacaattctgaaatcatagtgcagaaatgggcgaagcacaacaagaatcggcaatgcgattgacatggatgtgattggcaatccctgataacactttctgttctctgttgtctcatcctgcctgcactcttctgttacattaaaccatgccagacggatcaatcctgccaatacataaaacataagaataagaacaccgacaatcccattcattcccatacaataacagatgatcgccggtccaactccaaaacagacaatgtcacacagtgaatcaatctggattccaaaacgtttctctatttctgttctatccttctttgttcttgcaatcttcccatcaaacatatcacacagaccggacagtgcaagacacaatactgcaagatccagatgtccattcaatgacagcatcatcccaccaatcgaaatccacagactgatatatgtaagtataactgtgtaatcataaacacctaacattttatttcccccttgtttttattcttttcagaataactctccatttatttatgctttcttccttaagtttcttcctattgtaaaattcgccacgatcgtaaaaattgcactgatcagtaattctgtataatatccaagtcctctgcttaagatcattcccggaatcaaaagtgtgcttccaaaaactggttcaaaaatcatcgaaaacagtttttcactgatgcccataccacctggcagtggcagcatatccacagaaactgaaatcacagactgcagaagaatgatcacgaatgcattcgttccggacagtccaaatgccttatatacaaaccaggttgctgtaaacagtgcgaacctctgaaatagtgtgattgcaaatacattgaccagcaccatcatatgatctttcagataaaccgctgttgtatgatactgatccattgatgcattcagtttctcaattcttgtactcttatgtcgcatcagatgcattttttccagcagttccatcccttttacaagaatagaacgtgcaagcaccggatgaaatacaaggagcagcatagaagccacacaaaacacatttaaacctgttccaagataaaaaatatgacggatctcatacatatgtgttctgatgaatcccctgccgaagatcataagtccaagaccgatcacaacgagaaccatcttatatgtaatcgtgacaatcatcagcacaagtgttgataccggaattggaattttctctttcttcatataataaatctgcgccggctgtcctcctgttgcggatggcgtgatacagctgaaaaagaatcctacagaggaaaacaggaaacatttccatttctttagatgaataccaagcgtatgcatcatataaaatataataattgactctccccatataaagataatcacacagacgacacccggaaacaaccagtataaattcactgttttcaggatttctgcaatctcgcttaaatcctctccatggaacactccatagagtgttgccgcaaagacaagaaagagaaaaagtacattaaatatcattttctttttattttccattttctcctcctgctttatgaaccagatttctgtaaattttccatccgtttgtccggcagcttacaaaccaggtaagctccgctaccgcaactccaccgatcacatccacaattacatgctgttttgttacaagcgtagaaacaaagaccaacaccgcgatcattacagatacgatcttataccacaccggtatttttttatctctcctgattccaatacaacagaaccagcttgccatacaatggattgatggaaataaattcaccggtttatcaatctgatataaaaaacgcatgccctgaacaaaaattccatttccgacaagttctggtcttacatttgttgtcggataaaatacaaaaaacagaaaacaaatgattctggcatacaaatcagccgtaaaaaatctatattttatctcttcctcccgcaatgatataagcagataattaatcacccagaaaatgtaacatccaaaataaacaagaataaaggctgggatcaacgggatctttgcgtctaatgcaagtgacaggttatgacactcacctgtatccgccaatctcggtgctccccagtagacagctgaattcaccagaaaaacaattaccggtgggagtaagatttctattattctctttctgtccaaattccctgtcctttgtctcacttcttgttttctccattcttttcccattttatgatgtaaccggattgctccattgctatgcacttcccgcaatccttgaacattattttatcccactttttcataataacaataggctttggcatttattaaagaaaaaagtgccattctttaaggaacagcacttttttctttagaatttcttcagaatttaccccaaatgcatttcagggcttacatctcgtcttccctgtatccaaaatttttcatcatataatcgctgtctctccagttcttctgaaccttcacccacagcttcaaatttactttgcaatccagcagacgctcgatctcaaatcttgcagtacttccgatttttttcagcatacttccctgctttccgatgatgatccctttatgggaatctctttcgcaaatgattgttgcatcaatatgacacactttatgattcattttcatctgatcgattgctactgcgattccatgtgggatctcctcattcaagctgtgcaatgctttctcgcggataatctctgccacgatctggcgctccggctggtctgtgattgtatcttcgtcatagaactgcggtccgtatggaagatatttcataattacatttacaagctcatccgtattatcgcctcttcttgcagataccggaacgatttccgcaaaatcgcattccttgcgatatgcatctataaaagtaagaacctcttccttcttcaccatatcaactttattaataacaagaataaccggtgtctttaccttctttaactgctcgatgatatgcttctctcctgcaccgataaatgtagatggctctacaagccaaagtacaacatccacttcattcaaagaacgttctgcaatattcaccatatactcaccaagtttattctttgctttgtgaattcccggtgtatctacaaacacaatctgaccttcctctgttgtcagaacagtctggatacggtttcttgttgtctgtggtttatttgatgtgattgcaatcttctgtccgatcagacgattcatcaaagtagattttccgacatttggtcttccgatcagtgtgacaaatcctgatttaaaattatcctgcatactttttcctttctttttccatcttaaagtgtctttatttcaaggaacatctctttctgctcctcaatcttctcttcacttccgatcacgcaaagttcatgtgcatcaagtaatgcttgaagtacatcggcaagtgcacggatgtctgactgctgtgcatcaaggatctgatttctctcttccctgatcatctcagctgatacatgattcatataaagattcattgatctgcttccctttgctgccggattcatcggacggtcgatattactgatcgttccgataataaacttgttcatgtctctgtcatctacattgaagttcttcagatattccacaactccttcgtagatttccattgtcttctccagattcgggtcacggtaagataccagatatccctctccaatacgattgaagctgctcatgcatccgtaagctccgcccttcacacggacattctgccacagataatcatagcttaagatgactttcagaatctgaagtgctcctgtatattcaacaccacggtcgataaagttacctgttcttgcaacatactgaacttttgaagatgtcttgaatccctcgttgcgtttcacacaatgaatttcacacggtgttgctgcttctttctcttctgtatgaagtgtgtctgcaatctttgcaaatgcttcttccatcggtgcaagaccatccgctgatgaagtataactgatgatcagattatccttgcggaaaatctgctgtgcaatctgtcttaagttttcaatcagttctgctttcttctcctcaaagttttcctccagttcctttacaacctcatagtaaccgattccatcggtatcatctttgaacttcgccatcggtgaagtataagacagagagcgaagggctgctgtcgtatgtccggatgacaggaaggacatctgcagtctggatttgagcattgctaagatctctttcagacgtttctcgtctccaaggtcagattccattaagatttcacgcatcatggagaacaaaacatccatcttcggatacagcgctttccctttgatttcaaatgtcgcacagaattctttctcttttacctttgttacatctgtataaagctccagagaagttccgattcctcctgtgtgtacattgatctcattaaataattcactgtattcataattctttgtattaataattccaagcacactctgcagaatactgatatatggaagtttctcttccggaataccggacaagtcaaacaaaagcgctgtgtatccgattccattcgtctcaacttcgtggtgtaccagcttcactccgcctgtctcaagctctttattataaatcggtgcgatttctcttgaaatatcttcgcgtccgagtacaggaatcttcgccaggtcttccggtgtcgactcttcttcctgatattcttccaactctttcgttgctttcacaagtgcatcgatttcttcttttgacaaactgtctttgtatgcctgaagcttatctgcaagttccttatccattcttgcagtacgtccgcgctccggtttgataataacgatagaaccatgtgtgttatcaagaagatatttctgaatcagttcttcaaaatatcctgtctccacctgttctttcaagaattcaaatgtcggaattgcctgcatgtggataaatggtttcgtctcatcatacaaccagctgtcaaacaactgcaatccatacatcagtccacgcggataatttccgaaatctgcctcacggaaacggaactcatgatagttgattccggcacggagcgctttcttattgattccatttttcacaatgtctttcagtgtatcttcaatcacacgaataaattcttccttctgctctacattcgcattcttagaaattacagagaaaatcggctgataaactccattgtcataagatccggaaatatccttgccgacacctgcatcgagaagtgctttcttcagcggtgctcccggtgcggacagaagtgcataatccaaaatctcaaatgcaagatacagcttctcatccagtgtcgtaccgatcactttattataagaaagatatgtgttgtcctcatcactttcctcactcgcgatggaatactcctgaaccacttccttcatctctgtaaatggcttctgcagatgaatctctgaatccaccggttcattctcaaaatctgacaaatacttctcatcaagccatcttaatttttcttccatatccatgtcaccatacaggtaaatatagctgttagatggatgataatactttctatggaaatctaaaaattgctcataagtaagttctggaatcatctctgggtctccaccggactctacggaatacgcattatccgggaacagagaattcagaaccacgcggtcaagcacaccttccggagaagagaatgctcctttcatctcattataaacaacaccactgatcgtcaattctccatctggatcatccagcttatagctccatccttcctggcggaatgtcttgtcatgctgataaatatttggataaaatactgcatccatataaacatgcatcagattctgaaaatccttgtcattacagcttgccaccggatatactgtcttgtccggataagtcatcgcattcaaaaatgtattcagagaacctttcacaagctctacaaacggatccttcaccggaaattctttcgatccgcacagaacagaatgttccataatatgtggaactcctgtactgtctgacggtggtgtacggaatccaatcgtaaacactttgttctcatcatcattttccataagaagcactctcgctccgcttttcttgtgcttcagaagtgtcccctttgacttcagatcagataaatcttctgtttggagcacttcatatgcattcaaatcatatatactcattctttttctcctattgctttttttctaatttctttattcttctgttcctattagaacttttttcccacgaaatgcaaatccataatggcggattcgctcctttttaattcctctggcaagcagttccgtatcatattctttttcttcaatctgacgcagtgcattctccactgtctgctcaagtgatttttcttttgttatattctgaaccttaaattccattacaattgcatccaaatctgcttttaatggttccataactacatcataacgtccaaatccactttccctgttggaagtaatcctgtatttgtcagctagatccacgatcagtccaagaacaaatccgtggtagaatctctccggtttctgttcttcggatggcttattcccggtatcaaaactgctaaaggtctgaagtgcaacctgattcatgaactgattcatataatccagatttcctgcaatcaatgcatctttaaagttgccatatgcagaatcttcttctgagaaccagtcttcgatcatcttctcaaacatcagcatcgtctcatggtttgtgattttcagataatattgacgcttaccggttctgttatccatctcataccggtcaactttcaggtaaccactggcaagcagaagactccagatggctccacgttttcttccaagctgctcaaaaatcacctgttcatccaaatctgtgctgattgttctaccttgcaacagatcttccatctccgatttaatctttgccggacttcgacgaatcaaattggatacaagtacatttccactggtatctgcccagtaagttccatattctcctgtatctagatattttgtgatcgaccacggattataaatgtctttccgcttcccaaaagaaaatccatcataccaatagcggacattttcttcttcccttgacagtccattgtactctaaagcattaaagacctctttttccgtaaatccgaaaaaaccgctatatttttcggatgttgttgtcacgacttcaagattgttcaaatctgaaaaaatagattctttacttactcttgtaatcccagtcaataatcccctctccatatatggattcgttttaaatgttgaattaaacaagcttctgacaaatgcagtaagttctttccaatatccatgaacataagcctcctgcaaaggtgtatcatattcatccaaaagaatgattacctttttaccataatatctttccaggtaatcagacacatagttaattgcaattgctgctgcatcatcagacattgtttcctcaactgaatcaaaatatgcacgatctttctcattcagctgctcactgtttcttagaaattcaaactggctgtacattctcacaagctttcggataattgctcttctggctgactcatatgttgttgctttaatatcagcaaaactaagtgagattaccggatagctgccttgaagttcacggaatttttcatagctccagatattaagttcctcaaaatattttctgctatctacatggttcactgaaaagaagtattctgtcatactcatatttaaagtctttccaaaccttctcggacgggtgattagtgtaacactatcctgattttcccaccattccctgataaaatcagtcttatcaatataaaagcagttgttttttctgatcgatacaaaatcctgatttccaatagatattactgacttcatataatccagatcctttccgcatgttatcatcgcattactttccctattgtatcatattttttcacttaaacaaagagtatagtttgtaataacatttggcacttaatgatatgttactgtaaatcagaacctttccttttgctctcctttgtacgcataactcacatcctggaatataacttctccctaaagacctgacaacttctcctttttccagttatcctcgacatcactttcaataccttttaatatttatagtttttatctataaatatattcttcatatatacattatctattggaaaacttcgttcaaaaacgataaaatttatctataaacactttggttatgagtagattgttcccatcgtttattttttagaaagtatacgttaaaaaagaatctatctacaccagctatccacaaatcaaacaataaggagaatgattatggaaattattaaagatttaccggaagtatttgaagaatttgcagagcagcgtcagaaatcatttctcgctgtaaaacagttaaaggacaaaggaattcctgtgattggatcctactgtacttattttccaaaggagatcgccatggcaatgggcgcagcaacagtcagcctctgctctacatctgatgagacgatcccagcagcagaaaaggatctgccacgtaacttatgcccactgatcaaatccagttatggatttgcaaagacagacaaatgtcctttcttctacttctcagacgttgttgtcggagagacgacatgtgacggtaagaagaaaatgtacgaatacatgggcgaattcaaagaagtcttcatcatggaactgccacaatcccaaaaagctgaagtactcgatctttggaaagccgagattctccgcttgaaagaatatctcgaagaaaaattcgaggtgacgattacagacgagcaggttcgtgaagcagttaagctggagaataaagtgcgtgcatccttgaagaacctttatggagtaatgagacatgatcctgcaccgatcaaaggacatgaccttttccgcgttctgtacggaagtggttttaagctcgaccgtacattgattgccggagaagttgacgcactgacagctaagatcgagaaagaatatgcggaaggaaaacgtgaagataagaaacctagaatcttgatcaccggatgtccaatcggcggtgcaacagagaagatcatcgacgctgttgagaataacggcggaatcgtcgttacattcgaaaactgctccggtgcaaaatccatcgatcgtctgattgacgaagatgctgaagacatttaccaggcaatcgcagagcgttacctctctatcggatgttctgttatgactccaaacccgaaccgtctggaacttctcggaaggctgatcgacgagtacaaagtagatggagtacttgaaatgacgcttcaggcatgtcacacttataacgtagagactctttccatccgccgctttgtaaacgaggaaaaaggaattccatacatgaacgttgagacagattattccaagactgatgtcggacagctgaatacacgtattgcagcctttatcgagatgttataatctgctatacttgaattattacggttactgttcacacgatgtgcgaccagcaacgcatctcgccattttaaatcgcctttggcgatggggcgagatgcattcaagccaaaacatgcatcctccgtgtcaatcagcgaagtgattgacacgggagtgaacagtaacctattacgaacagtcggctgttctcgtgtgagagccgactgtttttataaaggagtttttattatgaactatattggaattgacatcggttcaacttgcgcgaaaaccgttgttttgaacgaaaagaaagaatttatccaggaattcgttcagccaaccggatggagcagcgtagatacagcagaggaaatccttcagaaacttaagcttgccggaatcaatctttctgatgacccttcctgctgtgtagcaaccggttacggacgcatctctgttccttatgcagataaggctgttacagagatcacatgccatgcacttggtgctgtacatttatttcaccagccagacctgaccgtaattgacatcggtggccaggatacgaagatcattcagattgaacagggcttcgtaaaggattttatcatgaacgataaatgcgccgccggaaccggacgttttcttgaagtgatggacaacaccctctcccttcgcccgaatgaaatgtttgagctggcacgcctgggttctgacacaacgatcagctccatgtgtactgtattcgcagaatccgaagttatcggactgatcggcaaaggtgaaccgaaagaaaatattgcttatgcagtagtagattccaccattcgtaaggttaccgcccagctcagccggatgaatggtgagatgtccacattttgcctgaccggcggtctatgtgaatgtgaatatatccgcgaagctttatcaaaaaaacttggaaaagaagtgatctccagcccggatgcccgctacgccggtgcgatcggtgccgcactcagtgcgatgaagatacgctaacaaaaaatgccccggaacagactttaaaaccaatctgtcccggggcaacttatattctttcacttatattcttttatcttgggcttttctcttcgtctattatctgattctgaagattgggctgatcttcttgtagattaaaaatacaatcagtgaaacaacaattcccttcacaaggttgaacggtgctaccgcaaacataacaaatgtagaaaggcttgtgatatgtgagttaactgctgttcccataccaaccagtgcgtcaatcggcattccgaatgcagctgcataagttggaagcaatacaaatgcgttgacgaagcatccaatcacgatcatcagaactgttcctgttaccattccgatcaatgcactctttcttgttctgtttcttctgtaaatgaggcctgcaggtacacagaatgaacatccgataataaagtttgcaatctctccaacacctgctgtttgtgttcctgttaaaacaagattcagtaagattttaacaagttctacaagaactcctgccattggtcccattgcaaagcatcctaccaaaaccggaacctcacttaaatcaatcttataaaatgtcggtgcaaacggaagcggaatatcaaacatcatcaaaactactgcgattgctgaaagcattccgatctgaactaatgcctttacccccagcttcggctgaatcttcgcatctgcgtttgttagtgtctttgtctctgtactcatagtgttactctcctttttctatccactgtctttatcctaaacagcactttttctttttgaaaaaggtaatcttcacaagaaaaaacccggaaggtttattaccttccgggattcatgttttctgctcttaatggcattctcgcaagattctcaggcaatcagatatcctattcgaatatctctctttctgttcctgcgggcatgaacttcttctctcatccagactttactgtcggtaccggaattcccattctgtaatgccatcacagacgagtcaccagttcagccgcatcatatgcgggtcgcggactataccgccggttgggacttgcaccctacccccgaagattaaattccttttactcttactactatagcgcgctcttaataaaaatgcaaccccttttattgatatttaatatcatttttgtgttgaaatcgatatcacccacagcactttcgactaatatgttaatattccttttatcctactaggtttatagagttcttaataaaatttttcaataatgttcattttaggttcaaaagttcatcacacttttttcacaaaatacctctatactataattgttcttaaaaagaacactttttcataaactttttcccccttgagtcacagagatgtggctcatttccttttatttaaagaaaatcctgtcatctcgacaagattttctcatacattctttacagaacacgttttctccatttttcccatagggttccctgtacatactgataagctttatcataaaccaatatcgctatctgtccaaccattacagctgccaaaagcaactgatctgacaccgctttctgaaacagcatcgaccggaatccaaaaagacacgggagataaaccaagttaaagatcaaatattttgcaaaccaaaaaaatcccatcctatgtcccatctgtggtcttttcgcaagaaacatccagaccgcttcaattccaagaatatagaatcccatcgcagcaaatgtaatcacataaaacttatttggcgtgacaagaaatcctaataacactgctgccagataaaaagcaactcctgtgcgaagtccaaactcgcggataacaatccctaccccaaatgccgctgctgccagcaaaaacaatgtattcgtctcgatcacgcttccaagtgccatgcatacgacagtcactgcaagcagaaggccgccgaatgctatttgttttgcttttacatgcatgagcagagatcgcctcccatacattcacacaatgtgtccgcaagccataagtcgcagcacatatttcctgtaccacaggaattctgtcctcccggtgcatagcctccaccatacggactattctgatatcttctgctgttaaagtcgagctgattcaacagctgacgaaactgcatgttatttggttccatatttaccgcctgtgccgcgtgatccctcgccagaatctgatttccgattcctgcattcgcacagccactcagataataccacattgcacttctctgctgaacctgatccagtgtattgatcgcctctctgtaacgtctgctgttaatataattcgcagctgcctgcagtttaggatccatcgttccatagccataagagctgttctgatttccataagaataactttcagaagaaccatatccataattattcccatacgaatttcctccgttcgcacgttctctcatgataatatcatacgcttcctgtacttccttaaacttctcttctgcaagatctgctaacggattgttcacatttgcatccgggtgatattttcttgtcagatcccgatacactctctttatttcatcatccgatgcgtttggtgataccccaagcacatcatatggatttttgttcatctttgttgtcctctcttttcttcatctgaatcttattataatgattccaaactccatcatacagtatatttctcaaaatgtctacgtcaaccagacatggtaattgttcaaaacgaaccgtactctccgcaatcatcatccgaagaatctgctccatctgcgcctcatagtccggccgctttgccagttctttcaatggattatagcgattcttctttctatcttccggcagatcctcgtaagcgtccatcagataaatgaattttccgagatagaaccccatctttctgagcgtcttctcccagatatcctccttccaaacaaaaagttccgccattaatctgccaaaacatccagtagcccggtcaatatccatgctgttctcatgttcacattctccaagttctttcagagatttccggatgatctcactctgccgcggatatttctctatgattttcttcgcttttccctgaatcaggctcttcgtcatcagacttgacactttacgatcatcctgccagtcatcttccatatgataataagccagcagtacattcatcgccgccgcataagatgtaatctcattttgcaacatatgctgccgcttcaccggatgaaccttacagcggtgttcctcatgtttcgtaatcgtctcatataaagaagataacagaataactgcaaatgtcatgtcatacgtcaatgtcatctgccccataaatccataatcttctttcaatgtacagcaaagtccacaataatatgccctgtatttcttcagatcttttacttttaattccggttcacagaccgttacatatccaaacatgcaatccctttctcttctggcaattttcctgactttatctattctaccttattctttccactttgcctatcacatgtctgcaaaattaataagatcttcacagattttttaattgttaacctttttgcattttatagttgacaatcaacttttcatgaattatactaacgaagaactcaatcgttgttatatttcaaacagcaatgttaaagctcgcttaaaacagcgataagtattaagatctaaaggagtaaattgaaatgtcacagaatgaaacttccggcacagttgccgtagacaaccagaaaataaaaacaaaacagatggtgctcattgccctgatgactgcagtaacctgcgtcctcggaccactttccatcccgctgccattcagccctgttccgatctcccttacaaactttgcaatctttcttgcaatctttgttctcggaatgaaaaacggaacaatcagctttatcatctacctcctgctcggagcagttggtgtcccggtcttctcctctttccgtggaggtctccaggttctcgcaggaccaaccggaggatatctgattggattcatcttcctcgcactgatcatgggatttgcactcgatcactttgaccgtaagctcgttcctacaatcatcggaatgattatcggaatggctgtatgttatacattcggaactgtatggcttgccaaactgttaagcctctccttcaaagaaggacttatgatgggtgttatcccataccttgcaggagatgtagcaaaaatcatcatcgctgcaatcgtaggtccaaaactttacggagcaacacagaaaatcagataattgaattaaaaaaacgcccaaacagatactctatttgtttctgttctgggtgttttttacttttgtcctcaacttcaatattttccttgaatccgtcacctcgaagcaaatactttcggtttgaataatgtaagtgaggaagtttctttgttgttgaggacacatataaggcaggagcgttccgaatacactttgcagaatctgttaggaaaagtcagacaggaaccccgcatggcgagtgttctggcttttccgttacagattgtcaaagggatgaggtagagcgggccggtgtccgatgcaataaagaaacttcctcacgcatcttaatcaaacccaagctacttaaccttaaattcctctcatcgtcaactgaatcctcttcttcttcagatccacgctcatcaccttcacatccacaatatctccaacgcttactgcttccagcggatgtttgatatatctgtctgtgatctgggaaatgtgtacaagtccgtcctggtgaactccgatgtccacaaatactccgaagtcgatcacatttctcacagtacctttcagcaccataccttccttcagatctttcatttcaaggacatctgtacgaaggattggctttggcatctcatcacgcggatcacgggccggtttctcaagctctttgacgatatcacgaagtgtgatctcaccaataccaagctcttctgcaagcttcttataatcaccaatcgtaaggccaagtcctgtcagctgatgtgctgtgatagccgctgcttcatatccctgtttcttcaacagcttctctgccgcagcataagactccggatgaacacctgtcgaatccagcggattctttccttctgaaatacgcatgaatcctgcgcactgctcaaaagcttttggtccgagtttcggtacttttaacagttcttttctgtctgtaaatcgtccgttttcttctctgtaagccacaatattttttgcgattgcactgctgattcctgagatgtaagaaagtaacggtgcagaagcagtatttaaatctactccaactttatttacgcaatcctctacaactccgtttaaagactccccaagcttcttctggttcatatcatgctgatactgaccgacaccgatggatttcggatcaatctttacaagctctgcaagcggatcctgcagacggcgtgcgattgatgccgcgcttctctgtcccacatcaaatttcgggaattcttctgttgccagcttacttgcagaatagacagatgctcccgcctcattaacgatcacatactgtaccttctccggaatctctttcagaagctctacgataaactgctcagattcacgggatgcggtaccatttccaagagaaatcagggaaatgtgatacttcggaataatcttcttaagcagatccttacttgcctggatctttttctctgttgtcggcgcagtcggataaataactgttgttccaattacctttccggtctcatcaacaactgccagcttacaaccggtacggaacgccggatcccagccaagcacaaccttgcctgcaatcggcggctgcatcaaaagctgatgaaggttctttccaaacacttcgattgccccatcctctgccttctctgtcagttcatttctgacctcacgctcaatagccgggccgatcaggcgattgtagctgtctgcgatcgtctctttcaacaccggtgttgtatacggattttctgtacggatcactttacgctcaagatatcttaaaatatcttcttccggtgcttccaccttcactgtcaggaatttctctttctctccacgattcaatgcaaggattctgtgtccggcaagcttcgcaactgcttcttcaaactcataatacatctcgtaaacagactctgcctccggatccttcgcctgagaagtaacctttccttttctcattgtcgtctctcggatccaggttctgtaagctgcctcatctgaaatgctttctgcaataatatcacatgctccgctgattgcatcctttgcactttccacacctttttcttcggaaatatacgcttccgctgccttctcaagcggctcttttgtcttctgcaatgtgatcagtgcagccaatggctcaagtcccttttccttcgcgattgtcgcacgagtacgtcgtttcgggcgatacggacggtataagtcttctactgccacaagtgtttctgctgcaagaatctgtttctttaattcttctgtcagttttccctgctcttcaatacttgagattacctgttctttcttttcttccagatttcttaaatataccagacgttcatacagctttctcagctgttcatcattcagttctccggttgcttcttttctatatcttgaaataaatggaatcgtattgccttcatcgatcagctgtactgccgcatcgatctgccagcgttttacatccagttcttctgtcagtctctgattaatatccattctttttaatcctttccactttcataggcattctgtacctgttcggtcagttcttttccgccgttcgcataccattctaccacaaaagtatcaaagtaatccactggtttctccccgctgataatctgaagaaacgcttccttctccagctcctgtaattcctgtgggatttcagcatttacgttttccaggggtagcgtctctgcacttcgtattcccgctttctgcagttcccctactgcctcaattcttgacgcataagctgcccagccatttgccgttgtcaactgtccattcaagaatgatttacatgtgtcataataagatttttcgagtccactcaattccgacacatcaagtgttttgtccaacgctgcctgaatatgttccgttgtccgataaagtgcatcctcataatccacattaatattcaacggacgggctgtcggatctacattaatggaaaaatagtcattcaattctcttgctgaagcatcatttgcatatctagactgatcaaaaatagcactcacatactttgctacaatttccggatgttcatatcctttgcgtaccaccacatacatccactggtcatacgattcaaaaactgatatcttctgtgtctcattcacttgttctttgtctaaaagatacggtttccactctgcatttgaatcgacactatatgccgcactaagcggattattcggagcccaccaacgtccgtaaattgctccgcaatgtccggtttttaacagattatctatgttttccgtctttctcaacaagaatctctggtcgagtatcccatcctcatatagattacgaagctttgaaagtgctccttttgtttcctgcgttactgacccgtaaactacatctccactttcatccagaatccagtgacatggcattgcgcctgcatgtataaacgctgaatccactccataagtctggtccgccccggcaatcacatctgtactacaggcaagaccaatcgtctgaccgtctcctgctgcatcttgttctacaaatgcacgcactatctccaacgcttcttctaccgtttccggttccttcaatcccaacttctcaatccagtctttcctcaaccagagaagtggagctccgtcatcgatcaccgtattcggaaatgcatacaactttccatcaactgttgcagattgtaaaagcgaatctccataactgtcatacatttctttgatcgtgtctgttgtacactcctcataagtttctgtcagatcttcgatcagaccggcttcaatcaggcggagcaggttatctcttcctttcacgacaagcacatccggaatatctcgatcttcaatcgctacattgactgcctcttcatacgtattgccatcctgcaattcaaagacatctgcattttgaatattaagcactttcttcagatatctcgtatacgcattgttttcgtacgtatttcccaccgggagattcgaattatttgctcctgcaatcttaccaagtgtatacgtgactgtctcaggatattttccaagcggcgtatgcattgcttcatacatcagttttcttttcacttcagctgcttcgcctgcaccagactcactttgagatgcatctgactgttccatctgtctttgactttcttttgattcaaaacaagttccgcaccaaagtatcatcaataaaattaatacaagctgggctgaaagaattcgctttttcatatcgtttttcataacacctttgcctccgtcttcttcggaatccggataaagacacgcgttccttttccaggagtgctttctatcttcatctcacctttctctccgtaaagaacatggattctgtcacagacatttcgcacgccataaccggacgactgataggtcaggatctgatctgccttttcctgcgtcattcctgctccgttgtccctgatttcaaagaaaatatgcttatcttcttcacgaatcgtcagccacaatgttggatcctcattatctgacacatcgattccgtgatcgattgcattttctgccagcggctgcaggatcagcttcggtatcatataatcattaagaccgtctgaaatctgttcgaccacacggaactcgttatcatgcataaccaactggatcttgaggtatgcacggatattatcaatttcttttgccaccgtagtcattgtttcaccacgattcaggcttgtccgataataggtagacagtgccaatgttacatgactgatttcatcctcccccgcttcaatcgctttccagttgatgatagaaagcgaattgtaaaggaaatgtggattgatctgtgcctgcagtgctctcatctcactattctgaagctggatcttactctcatatacttctgagattaaatggttcatctgatccatcatgcgctggaatgaccgaatcaacacaccaacctcatccttggacttactctgcaccgtaaccttgcgaagtcccatattgatctggttcatattctctgtcaataattccaactgtgacaccatacggatggagaaaacataccctaaaagactcaaaaggagaacactgattaaaattaacggaatatttttaagcaaaagcttatggattgcattttcacttaccgcctttggacgatagatatagaaattccatccggtatctttcattgttctctgtgaaatataatacttatcactgatatccttaagattctcaatattctttggacgatattttttatccatagaacaatccgcataaacaacagttccgttttcatccataatcatgccacccgtattgtctgtaatctgactcatgaatggaccaagaactttttcataatccaggcgcatctccaatactgctttgatcgtatcattatcgtagaattttcgactggcaatgattgatttattccccccacgagtaatgctccactgcatcagcgttccttcattcagcctggaataccactgttgattctccgcttctgacattggaagaagtgtatctccatgtggcacttctatattgtcagaatacagcgtaatactccgaatctctttgtgatagatggtcggcatctgaagcaacggatctgctactttcacatatttcaaatatttctcataatctgattccatttccgtatcgaaaatattcctgagactttgtgaataggataaataatcgaccagattttcataaatctgtgactggttctcaattgagttcaccgactgctccagtattttttccaggttatactgttccttttctctcagctgattcgtcatgccatattgcatagaaaaagccaggaatacaaccggcaccaatcctacaatcaacatcaaaactgacagtttcttacggaatttcagattttcaaatcgatggagcagcttccgtatttgttttttcatccgcctctgttcctttcctgcatgcttccggtgtgtctccgaaaaattccctgaaacttctacagaagtatgagttattggaaaatcctacttcttttgcaattccggagatcttcatattcgttgtctcaagaagttctttcgctttttccatccgcacttcacggataaagcggttcagtgtcactcccgtttcttctttgaacacagcacttaaatatccgggagaaagaaataccattgctgaaagcgtctctgctccaagattcctctcctggtagtgatgataaatgtagctttttactttcgtaatctctgagcggaatccgtcttcctgttcctgtatacagtgttcatattcctgaagtgcttcgtctactatagcaatcacatccttcaggtttttgcaacgatataaccgatccactctcttcgaaagcattttctcatccattccatccatctgatcaagcaattcttttaaaattccggaaaatacaaactttacatacatatctgaaaactgcttattggcacggtatttatcttccaatttctgaaaatcctgacggagatggggcagatctttatattgaatatcattcgtgatctgttccatgatttcagaatcttctgccgggtctgctttcttctcttcctgcttctctccgtgaaaaaataaatgctgatgtggctggtagaactgctcttccagcattccttccagggctttaaactcctctgccagattctttctatcctcaatttctttactgaccgcaaaataacattcactgtcaaactgatgcgcaaagaaccgatacattttctctacaaccacatgatagtctgtatacttctccgcgaacagaaagatggactcatttgaattcagattcacataataaaattctctctgcacctcttccttcagacttgtcagaaaatgttcctcctccgtctcgaaaaaaccattggatgcactgacaagaaccatgcgcgaaaactgtgaaacatcgtcttctgtttcatccgttaatttctcaagttgaacaaaatcctcttcttttcccgaatatagatatctcaggaagaagtatttcttcagataatcttcttttctgttctgctgcttttgcttctcttccttagatgagatattttccatcactcgttgaaaggtcttatgaaattcgttcggatcgaccggctttaggacataatccacgacaccatatcgcagagcctctctcgcgtaggaaaaatcattatatccgctgaaaatcacgatttccatctccggatgatcttctcttactgctttcgtcagttccagaccattcatgtaaggcatcttcacatctgaaaacaaaatatctacatgattagatgctaatacgccaagtgcatcctttccattcgccgcttccagaatctggaattctccttcctccctctttaacagaaaacggattcctcttctctccagtttttcatcatctacgattaatattgtaatcattcccccgcgcctcccacacgctgactttgcagtttcaatgttttttcaaacttattactattccctttttaacgtccgaaaacagcagggagcgatttctcactctctgctgtcttttttaaatttttatgattctattttaattcatcttttagacaatgtctagactagcctttaactgctcctgccacaacaccttcgataatatatctctgacagaacaggtagaagataatgatcggcacaattgcaagaacaagagttcccatcattgctcccatatctacggaaccatatccacctttcagatactggactgccatcggcactgtcttatattttctctgatccaatacaagtgatggaagcagatagtcgttccagatccacattgcctgaagaattgtaactgttacacaagtcggctttgcaatcggaagtacaactttgaagaatgtctggattggtgtgcatccatcgatcatcgcagcttcttcaatctccagtggaatggatttcatgaatccggtgaacataaagacggaaagtcctgcaccaaatccaagatagatcacaatcagtccccatggatttcccatatgaagcatatttgcaatcttagataatgtaaacatttccatctggaatggtacgatcattgcaaacaggcaaagcatataaaggatcttcgtaaattttgtcttcacgcggcagatataccatgcacacatggagcaacataagatgattactgctacagataaaattgtgataaacaaactccatccaaatgcctgaatcaatcctgtctgtttaataccacggatatagttctctaatccgacatacatctttccggtcggtatctcgaacggtgctttactgatataggcttttttcttaaaggagttgataaataccagtatgatcggatacacatacagcagactgagcactgcaaaaatgattgttaataatgtaccatgttttacttttttgttcattactgctgcacctcctttgatgttgtcattttattctggatcaatgcaatcacacctacaataatgaagaagacaactgcttttgcctgtcctacgccttcccaaccggttcttccatagaatgtattatagatgttcagggcaagcatttctgacatcttgtccggtccaccgtttgtcaatgcaaggttctggtcgaaaagtttaaatccgtttgtgagtgtcaggaaagtacagatagtgatggatggcataaccatcggaattgtaacatatcttaaaagctgtactttattcgctccatcaatctgtgctgcctcgatcagttctccaggaatattctggattcctgagatatagatgatcatcatgtatccaacctgctgccaaagcatcaggataactaatccccagaagccgtattttgaagaatatgtaagcgttttctggaaatgtgccagaataccgtttaataacagctgccatacatatccaagtacgataccgccgatcaggtttggcataaagaatacagtacggaaaatattcgttcctttaatcttctttgtcaaaagcattgctaccgcaaatgcaaaaatgttgatcagtaatactgttacaattgtaaataatgcagtaaaccagagagagtgaagaaaatccccatctcccagtatctttgcatagttgccaagtccaataaatctggcgtctgttaccgttgtgaatttgcagaacgaaagatatacacctaacacgaatggtgcaaggaaacctatcgtaaatgcaatcagcgtcggcaatacaaataccggaaaatatctttttattgctttttgcatgttcctctcctcctgtctctctttctataaaaaagcctgtctgcacctttgctttttacatttctaatcacataatttcagcctgcccccggtattctcgttggcaggctgcatgatattttcactatttcacagcctttttatctgccggtcctgtgaaaagtcttttttattcatttgctgctgcatattcttctgcccagccatcaacaaatgctgtcttcacatcatcccatgtgcctgtgccctgtgcatatttcagaagagctccacccacattgttcttccagttctcagatggcattgttgtaaagttccagcttactggtgtctttccagcctttgtgtactcggcatttgcttttacaagcgggttgtccggaaggtaatctgagaaagttgtaaacggtgttacgaatcccatctcatttgccagcatgtcacgaccttcgtcactctcaactacccatttcatgaaatcaagtgttgcctgaatatcttcttcagaagcatttttatttacacaccagtagttctctgatcctgtacaaagtccctggttctcttctccgtcaactccgatgtagattggaagcattcccatatcttcatctgctacttcgttatctttgatatcattgtaagcccatgtaccattctgatagaatactgcttcaccaagtgagaattcgcttgctgcgtcatctcctgtcttagaagagatcatagatggctcacatgtagagttgttcagatacagatcccagatctgtttgtagttgtcaaggtatgttcccttgatagcatctgtagtatcaattccgtctgccttgtactcatagtagattggcaggtttgcaaggtgtgtcttgaatctccagtcagaagaagaatccattcctgctgaagtgaaagctccttctactccaagatcatctttatgcgcctgaatctcttctgcagctgtcttaagtgcctggaagttattcagctcatcgatggatttgatgcttgcatccggcagttcgaagtatttgttcagaagtgccttgttgtagatcagaccataagtctcaataacataagcgattccgtctactgcatcaccatcttttaatacatagtcatcagactcaacgtctttgtaaacgtcacttcctgaaaggtcatagcaataatctttccatgtagcaagtccaaccgggccgtttacctggaacaatgtcggtgcctcgtcttttgccatctctgatttcagctgtgactcatatgttcctgatgcagctgtctgtacatcaacctgaacaccagtttcatctgtgtactctttagcaagttctacccactggtcagcctgctccggtttgaagttcagataataaacttttccggatgacttatctccttttgctgtttcatctccgcctgatgtgcttccacatcctgcaagcattccgcctgccattgaagctgcaagtacaagtgcaagaatctttttcttcttcataattgaatcctccttttatgtttacttgtctttgtttttcttgatgatgttattataagaaaaagttccaaaataagatataataaaattccaagaaacataacactatttcaagattattgtaatttttaaagattttgtgtatgatacaagagttcataaagagtcaaatcggaaaggatgtgtctgtttttatgctatcagacacgacaggatagaaaaagatggatcgtacgatcaactatcagataacagaagaggcagatggcctgcgcatcgaacagttcctgcgccaccagggctactcctatcagaacatcacccagttaaaaaaaatgccggaaagcattttaaggaatggagtctgggagtatatgcgttcaccacttgctaccggagatcttctcacagtatatattcaggaaaatgaaagttcaccgaatatccctcctgtcgaactgccacttagcattatatatgaagatgaagatatccttgttgtcaacaaacctgccggaatgccgatccacccgtcactgaataattatgaaaattctcttgcaaatggattgatgtggtactacacgcagcaaggaaagccatttatcttccgctgcacaaaccgtcttgaccgggatacttccggactgactgtcattgccaaacacttgatcagttccagtattctctcctccatgggggctcgtcatgagattaagcgtgaatatcttgcgatcgtccgcggcagtgtaacacctccatccggcacgattgatgctccactcgcccgcaccggcagttccatgattgagcgaaaagtagacttcgagcatggagagcgtgcagtcacacattataaagttgtagaagaaaaaaacgggcacagccttgtctctcttatcttagagaccggccgcacccatcagatccgtgtccatatgcaatatttaggttttcctcttgtcggtgattatctatataatcccgatatggaatatatccaccgtcaggcattacattcctggaaactctcctttattcatccgatcacaagggagccgatggaatttacagcagaactgcctgatgatatgaaaaagattcttctatagtaattccttgcgtaaagaaagtccctcacaatcgagggactcttcttatacactaagcttcttatctgccatccatccgctaagtaaaaatactattacacagattataatgtagtaagcaggatatccgacaccaaagaacgaatctccttcgacctctacattcggaagtacattgctgatcagattataaatcttttctattataaatgtaattccaaagaaagctacgattgagattcctcctgcatattttgagtttctcaaaatcgttctagaaccaatcactgcaagatatccaaccatcacaacctctatccatccgacaaagatgcagaaaagattccagataatctgtgcgatcagctgcccttcgcctgacaattgtataaaactatctcttatgatcgcaaatacatttccaagttctccgacatactgaagcatccctacaaaacaaagcagtccggcaatcacataaagtgcaaacacgaaaaacatctgtacgatcgctacaacaaattttgctccaagaatttcccatacggatttcggagtcatccagatcatatagctttgctttgttttcaaatctctgtttaaaatcagtatactctcaattcccatatagaacactacaaaaaacgatccgactaataaaagcgttgcactgattcccatcaatgcatccttttcaaccagcacgcctccaagaaatgtaagcacacagacagctaaagctaccataacaatcattctcgaagtccgctgtttcttccattcatatttcattaattttcccatcgatactccctccttacatcttctgcagataaagctctgcaagtgaatttcccgttgtcattctctctgtttcaacattcacgacatccacaagctgtccatcttttataaaaatcgcatcctcaataaagctttctacctcttcaatcagatgagtagagatcaccattgtacgattctcatctgcttcttccaggatcaaagcaatgatctcttctctcgctttatagtccacaccgttcaaaggctcatctaacaagagaagatctgcttttctcgccaatgtcgctgccgctttcagcttggcattcattccgcttgacattgcagatgctttcatctcttcattcaagcccagacgttcaattgtttttctaaactgctctctgtcaaaatcctcaaagaaatctgcataatatgcttccacgtcttttactttcatatagctatagaaaaatggttccgtagacatatatgcaatggaagctttgtcataataactgagtggatgtccctcaaataagatttctccttctgtcggctttgtcagtcctgctgccatcttcataagcgttgtcttaccgcttccgttttctccaagaagcccataaatcgtgccctttttcaagttcagcgtaagttctttaactgcttctttattcccaaacttcttcgtgatacttctatactctaacatcatttctactcctcctcgtaatcggcaatctgctcgataatctcgcctttctgaaatccgagatcacgcatctcatgtacaaaattcttcaacaactcttccgccatctctttcttcacattatcaaacatatgctcctcctccgacacaaatgtaccgattcctcgcttcgtgtaacaatatcctgccaactccatctcccggtagattctcgccgctgtattctgattcaccttataaagaactgcaagttctctgttcgacggcatcttctcacccggtttcaactcgccctttaccatctttttcttaagctcgttgatcacttgaagatagattggacttcctgaattatattccatgtgatccctccatttatcttctttgtaatcactgtatcagtgctatatttagatagtacactagttttttagttttgtcaatggaaatatagacatttttatctttatgtgttaatataaatacactttcattatatttaaccaggcaactgagagggcgttctcacctgcttctagtcttgtggaaggggtggtcattatgagtacatatgaagaattgatggttattctgacgacagccagtttgattgttttgattttgaattatacacataaaaaatagacgtccttgcttggcggcaaacgtctattttttaatactttgctactgaagcagatgggatagagccatcaactcagttgtcttgttaagcatattgtaagtcactttttcacttctgtcaagcatcattcccaaagtttactcaatctgccagtcaatcggctcaatcccattcttctccagaaatgcatttgtctgactgaatggcttgcttccaaagaaacctctgtaagcagccagcgggcttggatgcggtgcttccaggataagatgctttggattcgtaagcattctcttcttcctttgcgcaggagctccccacagaataaagacaatcggtctgtcctgactgttcagagccagaattgctgcatctgtgaattcttcccatccaattcctctgtgagagttcgcctgatgcgcgcgcacagtcaacaccgtgtttagcattaatactccctgctcggcccattttgtcaaacatccatgacttggaatcgtacatccaagatcatcatgaagttctttataaatgttcacaagtgacggtggaatatccacacctttctgcacggaaaagcttaatccatgtgcctgaccgttattatgataaggatcctgtccaaggatcacaaccttcacattcttcagtggagtcagatgaaatgcattgaaaatatcctgtgccggtggaaagatcagttttgtcctgtattcttcgtttaccgtctcaaataatttcctataataaggtttagaaaactctcctttcaacgcctcataccagtctccgttcaaaccactcatttttatttccctcttctttctgcttcaaccattctctacagtctgacagaaattccttcgtttcttaaatactcttttacttctttgatttccagctctttataatggaataaagatgctgccaatgctgcatctgcaccgccctctgtcagtgcctctttaaaatgttccaacgttccggctccaccggacgcaatcaccggaatggatacactatctgcaattgcccgtgtcagttccagatcatatccggccttcgttccgtcaccgtccatactcgtcagaagaatctcacctgcaccaagggcctctactttcttcgcccactcaatcacatcgattccgacatccagacgtccaccgttcttataaatattccatcctgttccgtctgctcttttcttcgcgtcaatcgccactactacacactggcttccaaacttctctgccgcttcacggatcagctccggtctgttgattgcagaagaattgattgaaatcttatccgcaccttctcttaacaatgcacggaaatcatcaactgtccggattcctccgccgacagtaaacggaataaacacacattccgcaacctttcgtaccatatcaacaactgttcctctatcatctgaagaagctgtgatatccagaaatacaagttcatcagcccctgccttatcatatgcctttgcaatctccaccgggtctccggcatcctgaagatcaacaaaattcacaccttttacaacacgtccggcattcacatccaaacatgggataattctttttgtaaacattccgcacaacctcctacagttctacaaagtttttcagaatcttcagtcctacatcactgctcttctccggatggaactggcatgcgaaaatattgtccttctcaacagacgcatggatatgtgttgtatactctgttgatgccttgacaatctgttcctcttctgctttcagataataagaatgtacaaaatatacataagaattctcagcgattcccttaaaaagtcttccatcattctctaaatgaagggaattccatcccatatggggaatcttatatccttctttatcaggtatccttaagatctcaccctttagaattccaagtccttctacacccggagcctcatcgctgtgctcaaataaaagctgcaatccaaggcaaattccaagaaatggtgttcccttttctgtaacctcgcggattacttcatcgagtcctgactgttttaatttctccatagcatctccaaatgcaccgacccccggaagaatcactttatctgcatgaaggatctcatctctgtccgctgtaactgtgacatcctgtccaagtgcaagcaatgctttctcaacactgcggatattaccggcatcataatcgattattgctatcattttgcctacctcttatctgtaatctattatctagtatctattttctatactttaccacactttgcgtcgagttcaaaccaaaattcgacaccattgtcataatttttcacaccatagccctgatggaaagattccatgattgccttaacgattgaaagtccaatcccgtttccaccatattcacgtgtatgtgctttatccactttataaaatttatcccacagtttcggtatatcctcttctggaatcggttttccactattgaatacagaaacacgtacctttccttcagtccgaataattttcacttcgattctcttctcattttcagcatgatggatcgcatttgtcaggtaattacgcacaacctgctctgtcttaaattcatccgcccatacatacgctgattcgcctgcaataaaatctatatttgcttcagcctgttggatcagaatatcacagcttgcaattacgccctttacaagctttacaatatcaaatcgttcaaactccacttcatccgaaccaaattcaagctgattcaatatcagcagattcttcaccatccgattcatttttcctgcctcgtcaataatgacattacaataaaattctgtactctccggatcgtcattaattccttccttcagtccttctgcatacccttgaatcaatgcaatcggtgtttttaactcatgagaaacatttcccaggaattcatttctcatgtcttccagtttttctttttgttcaatatcatgctgcagctgattgtttgctgttttcaattcagaaatagtcttctccaactgttctgacattttattaaagttttcaccaagaacgccaatctcattttttccaccgcttgtatatttcgcatcaaaattcagattggccatatcttcggacagccgcgccagttccaacaccggtttcgtaattttacgggaaaaaatccacaccaaaataccaccgaaaaacaaaccgaaaattccaagatagatcaaaaactgattggcaagatttgcgctttcgcgtatactgtccagaggacttcgcatcgtaacaaacacattgtcactcaaatatccccacatttctaaatagtctatgccgctttgcggatcctttatttttcgtaccacataatcatttgtgtgcttcaagattctttcctgatcatcgtccttcaaaaagaaaatacggagcatctgtttgtacaggaaaccttcttcctttacatttgtaaatacaacttttccatcgtcagaaatatccatcgcgcagacatcaatatttgttttttcaagttccgccacaagtttcttctgcacagcctcatttccaagatttccattgttcactgcttcactcattgcctcatacatctcaatcagatctttctgcttatgagacatataatatcgtccaaggaaccctgtattaacaataaaaactgtcatcagaataaaaacaagaagaccaataaaaatagctgtcatctgtccgctcaacgtatatttccgttctttttttgctttcttcatctgatttatttctccgcgctctgaacttcgaacttatatcccatgccccagattgttttgatatattcgcccttatctcctaatttacttctcagtttcttcacatgtgtgtcaattgttcttgcatcaccaaaataatcataattccatacattattcaatattttctctctggaaagcgcaattccctgattttctataaaataggtcaacaattcgaattctttataactaagttcgaccggtgttccgtcaatcttcacgatatgtgctgacttgtcaacggtaataccgcctgcctccagcgaatcattgccgaccgttccaaaagttctgcgaaggattgcattcactcttgccacaagaatctttggactgaatggcttggagatgtattcatctacaccaagttcaaatccctgcaactcatctcgctcctcagaacgcgctgtcaacataatgatcggcactttagaagtctctcgaacctcacggcacacctgccagccatccattttcggcatcattacatctaaaatgatcagggcaatctctttatcttcgtaaaaaagatccattgcttccattccatctctggcttctaatactgtatacccttctcttgtaaggaaatccttcacaagttttctcattctgctctcgtcatccacaactaatatttttgctctttccatcttcttttctcctaacttatatttgggtgtaccacatcacttctacatttaattaccttttaatataccaaatagttttgtcaatattgtgaacaacaaaacggtcaatctataaatgtgtatcaaaacttcatttacagactgaccgtctcttcttttaatgtaccatattttgttttcgtcaattcttttcggtctgattattcaaactcatagttagaaaaacattcatttgcctcttcttcatcctgtccattcacaactacacgcattggcagtcccagcttaatagacattaatcccataagggatttaccatcgatgatataatttctgtttgccatatcagttacatcaacgtctgattttaatttctgacaagtgttgcaaaatgtcatgatctgcccggctgacataaacttcactttcttttctaccatgttttttacctccatctgtctatcaaatacaagtaataataaaagtcaacacagaaatctgcacaatgcctgaatgcagatttctgtaatttcaaacatacttgaccagtatataccacttattccggaggtgcaagtgaatttttgatttttttcgacatattgtctaccttttttgttataaagttctcacccggagaatcttgacagccactactgtcacttctataataattgatggcttattattactgctttcttccggaaagcagtaattcaatcatggcagtaggtactacacacaaaaatgaggtgatatctatgaaacacaaatttcaaatttctgaatctatccggcttggagcaatccttgcactttccggtggattcatggatgcttactcttatatggagcgtggagaagtatttgccaatgcacagactggaaacatgcttctctttggagtacatctctctcagggagacttccagaacacactgaaataccttttccctgtactcgcctttgcacttggaatcgctcttgctgaagttgtccgggctaaggctggaaatctgcttcactggagacagatttctgttctggcagaagcactgatcctgattgcagtcagtttcttcccaacagcattgaatcttccggctaatgcactgacttctttcgcctgtggaatccaggtcgaaagttttcgtaagattcacggcaaaggaattgctactacaatgtgcatcggtaatctgcgcagtgggacagagaacctacaccactatttccatacaaaagaacgacattttctagatacgagccttttgtattacggaatcatcgcctgctttattgtcggcgcagtaatcggcaatgcagcagtccagctgttccggacaaaggcaattcttggctgttctttcttattattaatttcattctttatgatgtttattgattgggaaaagaaagaaaaggagcttgcactttaatgtgtggcttcttttttcataccggttttctcagatagaaaaaatcccgaaagtgcaatgttgatcagcacttccgggaaataaatttactgcggatgacaggacttgaacctgcacgtcgtaaacaccagaacctaaatctggcgcgtctgccaattccgccacatccgcatatttcttattcaattattgattaagaaaaaaatagaacaagcaatttgcttgttccagtgagcgtgcggggattcgaaccccggacaacttgattaaaagtcaagtgctctaccacctgagctacacgcccttattcatttttatttctttcctgctagcaggataactgggctagctggattcgaaccagcgaatgcaggagtcaaagtcctgtgccttaccgcttggcgatagcccatcgaagacttcatatctgacactgcacggccagttggaatatttaaagaaaaaggtggatagccggactcgaaccggcgatatccagaaccacaatctggcgcgctaaccaactgcaccatacccaccacaaaacgagcctggggggattcgaaccctcgacctacggcttagaaggccgttgctctatccagctgagctacagactcatttctctcttaatgagaacctctcgttttcaaacgagaagcgggtgatgggaatcgaacccacgtatccagcttggaaggctggtgttctaccattgaactacacccgcaggatgatcggggtgacaggattcgaacctgcgacctcctggtcccaaaccaggcgctctagccaagctgagccacaccccgatatcagttttatttccttgtccctgcggctttgtgtttctttcgtatctcccgcagcgacaagatatattatatggcatgtttctcagaaagtcaacaggttttttaaagtttttttacttttttgcgactgtttttttacctgttttccacaagaagagtgtgcaaattgtttcttttgttttagttttctgataattagaataattatagatatttttgctcaaaacttaattttccgtccccatcgacttccatgatcatatagctgcctcgtcttccctcctgacgtggaaaagatagacttcccgggtttaaaattgtcattccatccttctgaagaaagaaaggacgatgtgtatgaccaaacattacgagatccgctcctcttgatctgccctcttctatgatagtttccatccccatggacacataataataatgtccatgggtaataaatgcatgataaggaccaatctcaaactcctcttctctcggaagttctgtaaaaaagtcgttatttcctcttataatatgcttctcacactctacgacagcctccagatagtcttctccgccttctacatctccaagatggataaacatatcaattttcccagcctcttctaatgcgcggtccagtgcctggtgtcttccgtgtgtatcactgacaatcagaattttcatgcttcttcctcgttcaatttctcttccagcaggatttttattgctcgaagtgcttttcctctgtggctcaatttatttttctgctctggtgtcatctccgctgttgtacatccgaattccggaacatagaagatcggatcataaccgaaaccattcgcaccgacaatctcgtgtccaatttgtccttcaatcgtctcacggactacgcttgttgttccatccggaaatactgctgcaaccgcacagacaaatcttgcggtacgctcatcgtccggaaccccttccagtctgtccagaaggattctgttctttatatcataagaagtatcctctccggcaaatctcgcagaataaattccaggtgccttatccagatagtcaatctcaagacctgaatcatctgcaagaacaatatcgttgaccagcactcgtgatacagctcttgccttgatctctgcattttcttcaaagctcattccatcttctacgatttcttcatcgactcctgcctcacgcatcgatacgatctccataccaagatcagcaagaatcatccgaatctctttcatcttattttcatttcctgttgcaaatacaattcttctcttcattttgctttctaccttctattctttttcgccaacaatctagtacagagtttcttatttcttcggtctcggtggctttggtccctggaactgatagaaatatgttttcagcataccattataaatcttacggttcttatctgcttttcttccgaaataacgttctgcgtcttcataacttgtgatcatgtatgcagaccagctgtcaagtttcctaaagctctcgccaaattcacgatataaaccaggaagtgcctctttctcctcaagacgctctccatacggcgggtttgttataataaatccatatttcttcggatgactcagtgcactgaccggtctctcctggaaatggatcagatgatccacacctgcattctctgcattctgtcttgccatccgcacaacatccccatcaatatcatatccctggatatccgtctcaatctgatcatcgatcagatcattcgcctcatcaatggcctcataccagagtttcttatcaatcagatttgcccagctctcagccgtaaaagaacgattcattcccggtgcaatatttgctgccatcattgctgcctcaattggaaatgttccacttccgcaaaacggatccactaagatacgctcttttctccacggtgtcagcatgatcagtgctgctgccagtgtctcagaaatcggtgccttgccggctgatggacggtatcctctcttatgaagagaatctcccgatgtatcgattccgatcgtaacgatatccttcattaaaaatactctcagtggataagaagctccatcttcctgaaaccactgtacatgatatctgcttctaagacgatctaccatcgctttcttcataattgactgaatgtccgaagggctgaacagcttactctttaccgatgaagctttcgccacccagaacttcccattcttcggtatataattctcccacggaattgcttttgtcttctcaaacaattcatcaaaggtaactgctttaaaacttcctgccttgagcagaacacgttctgctgtacggagaaatacattcgctctgcacgctgcatctgcttctccgtaaaaggtaactcttccatcttccacctgtgcgatctcatatcccagatcctgaatctccctttttaatactgattcaagaccgaaatgacacggcgcaatccattccattctttccatatctacctcatattatctttatgtacttagttaattgttactgttcacacgatgtgcgaccagcaacgcatctcgccattttaaatcgcctttggcgatggggcgagatgcattcaagccaaaacatgcatcctccgtgtcaatcagcggagtgattgacacgggagtgaacagtaactattaattactgttaactgattctttttacagtattataattttactataaatgaaaggcagagtaaagtgcgattgcctttcttctctgccttgttactgtttataagaatcttattcgttactgcatacagtatctgttaatatctgtctgactcatcataatcatcttttccgccatagcagtcatctgcatttttggaattgcagtttgtgctgttcttactctgatttgaataagaatttttactggaattcttattcgaacctgaattagatgttgaatttctgttcttactctgattttcttccttcgatgaatagaatccattctgggaatttttacttgtgttgctataattttttgccatgatacttcctccttatttggtgttactgttcttattaactgacagtaactatttagtacaatctttattatcccaaacggaggtctttttatgcattttgtttcaaccatattttgaatattttgcttgctttttccaaatgcatatattatactgattcatgtagaaagattattttctacaaccccttattaattatttatactcccctcaaaagaccgatggctcccccatcggtcttttacttttcttttttctaatatcgtcggttcccaccgatcagtctgatcacgatcataatgatcagaagaggaacaagaaccggtgccagaaaactaatgattcctgttataacagacacaactactacgactacaaatacaactgcaagaatcagcaaagccttcttccaccaggtatctaatctgaactcatgataggaaccataagaatgctctgttccatattcattcttctgtccataaccagtatagctgtcccgtgcctgcgttgtctggttgtacgaattattgaatggactcctgttctcataaaccacttcttcgtctgttccatcacttgcatctacaatggttttcgcaattgcccacggatctccgagcagttccaaaacctcctgctcgctctttccttttctcatttcttctataatataatcatcataaaacttaagatgatcctgaattgttgctgcatcaagctttccattcaaagcttcctgtaattttcggataaattcctgtcttgtcatattcaaccgttacctcctgttcctaaggttactgttcacacgatgtgcgaccagcaacgcatctcgccattttaaatcgcctttggcgatggggcgagatgcattcaagtcaaaacacgcatcctccgtgtcaatcagcgaagtgattgacacgggagtgaacagtaactttcgaagttctccttagatgtagaataccacactgctattcttttttaaaccgttattttcaactacatctgtcgttcataatttgttcatttatcatttaaaaatctttcatcttcttatcactttttcttcatttctctcacatatactataagcatcaaaggaaaaaacaaaaaactttgaataaactttttcataatacatgccgggagccagtaaatggttacccggcatcctcccttttatggagacttttttcttattccggaacaaccggatcatttatcacttcttgtttcgtttcctgttgtatttcctcttctacagatttttccgcggtttcctctgtttgctgttctgtcgtttgctctgcttcttccttgttttccccattattctcttctttcgtcgtttcttctatcttcttttcacatgctttgaccgattccagaatctcctgaacccgttcctccatctctttcttccatttcatatcttccaatgctttttttctgtcctgttcagtttcactatgttcttctggtattgtttttacatcgtctgctttctgagcttgcactgccgtttcacttttcccaactgtattgttgctctctcttccccggctcatcccaattcctgctgccgcaattactgccccggcagcaaataaaagaaccgccagtttgacattccgaaattttactttctgttccaaattccattcctcacgttcctccggaagatcacgtatcacctggctgatcttgtcataatgccgtcttccgccaccggtacaacgttcaatgatccgctccagtctgcgttcttcgcttctgctaagttccgggatctgctctgtatatgccagtaaaaactgcaaaattttaccatatccgaacaaatctaccgaacaattcttcctgcttcctgacgctgtcgggcggataaaatgacttctcaccgctttctgctgcatcttcttcataacaaattcattttcctgtgcatccggatttaaaagcagcaattctccttcttctgtcacaacaatactatatggggtcagacaacgataattctgcccgcgtctcgactgctgatactttcttatttctccggcaatctgtcggaaccattcaaacaacaccgctttatccaactgtgtattatcccgcagataataaatcaacagttctccctgcaggcaatcgatacttggctggcattcggttcctttttccacgaagcgaagtacttcatacattttttccatatttaattctactgcaatctgtcatctaaacgtgtgcggccccacaccgcacacgatacaatacctgtccaattgaaaattatcagaatctgatacgaactactcttcagaatctttcctgattcttcagtcagaacgactgaagtgtgactctcatattaattgaattcttccagtctgtcaagagctgcggcaacaactttatccatgtcataatatttataatctcccagtcgtccgccaaagattacattttcttccttttctgcaagcttcttgtattcttcaaacaatgtattattcttctcatcatttaccggataatatggctccatgccaacactccattctgatgaatactctctggaaataactgtcttctcctgtttgccaaactcaaaatgcttatgctcgataattcttgtatacggaacttcacgctctgtgtaattgacaacagcatttccctgatagttctcacaatcaagaacttctgtctcaaatctgacagaacgatactccaatgctcccagctgatatccaaaatattcatcgatcatccctgtaaaaataatcttctctgcaatctccggattctcttttctgaattcaaagaaatcaatccctgtacgaacttctgtcccttccagcatcttctcaacgattgctgtataaccgccaaccggaattccctgatatctgtcattgaaatagttattatcgtaaacaaagcggaatggcagacgtttaataataaatgccggaagttctgtacactttcttccccactgtttctctgtataacccttgatcagcttctcatagatatctcttccgccaagaaaaagtgcctgttcctccagattctgtggatctgtgattcctgtctctttgcgctgtttttcaataatctcttttgcttcctgcggtgtacggatattccacatcttactgaatgtattcatattaaatggcaggttataaagttcatctttataaactgctaccggtgaattgatgtaattattaaattccgcgaactgattcatgtaatcccatatctttttatcagacgtatggaaaatatgtgcaccatatttatgtacatggattccttctatgtcctcacagtaaatatttcctgcaatatgatctcttcggtcaatcacaagacatttcttcccttttttctttaattcatgtgccatgacagctccataaagacctgctccgacaatcagataatcgtattctttcatttactccttctttccgcagaacgattgtctggatccggtaaaattcagagataacctttctgccctcttttttttcatgttacggtgcgtttatgataacacattttctaataaatttgaatctctatcaaaaatacggtatacttaacagcaaaaggaggatgaattatgcttataaaaaatggttttctaattgatcctgcatctgatacagaacgtcttgtcgaccttcgcatcacagacggtctgatccagacactcgcagatgccggaactctgacacctgaaaatggagaggatgagcttgatgctgcaggacttatgatttctccaggacttgttgacacacacattcatttccgtgatcccggatttacttataaagaagatctccataccggatctcttgcagctgctgccggtggatttacttccgtgatctgtatggcaaatacttcaccggtcatcgattctgttccggttctcaaagaactgatggaacgggaggctttggaagacatccatattttccaggctgctgctgtctcctgcggactcaaaggtgaggaaatgacttctatgaaagaacttgccgctaccggtgcctgtggattcacagatgacggaattcctcttaagaatgctgcctttctctataaggcaatggaagaggcgaaggcacttgaccttccgatcagtcttcatgaagaagatcctgcatttattgaaacaaacggaatcaaccacggacctgtatctgatgcgctgggcatctacggatctccttcgattgctgaagaatctcttgttgccagagattgtctgctggcgcttcgttccggtgcacaggtcgtgatccagcatatcagctccggacagtccgttgaactggtacgcacctttaaagctatgggagcaaatctacatgcagaggcaactccgcatcatttcactttgacagatgaagctgtgttaaaatacggctctcttgccaagatgaacccgccgcttcgtacagaaaaggatcgtcttgctatcattgaaggtctcaaagacggttcgatcgatctgattgctacagaccatgcgccacacagtacggaagagaaatcccgtcctatcacccaaacaccaagcggtattattggtcttgagacttcccttgctctcggaattacttcccttgtacgtccgggacacctgacattaagccagctgatcgagaagatgacgatcaatcctgccaacctgtatcaccttccgtgcggttctgtcgcagaagggaaagcagctgatcttgtactgtttgatccgaatgagaaatggattcctgagacttatgcctctaagtcttccaattctccatttaccggatgggaattgtatggaaaagtaaaatatacaatctgtgatggaaagattgtatacaaggactaatacgtaactgttacattatttttataatctaagaggttccctgcagaatctttcatttccgcagggaacctcttctttgctcattaatcctcgatcgctgttactgtataatctttgtcttcgactgtctttttcagcacttcattactgatttcggaattcagtgttacaactgctgttccggcctcatggctgacttctgctgtatcaacctgctcaagtgcctcgagagctttcttcacagccgcctcacagtgtccacacatcattccttcgattttcattgtctttgtcatttttgtctcctccttgttttctgactcatttttgtctgttaagacaatatctgaaacagtattttctgctgtttctacctttttcatctttctttttctgtctttgctggcatcgtacattttaaacagattcagtctcaatgcatttgtcactacacagaaactggacaggctcattgccgccgctccgaacatcggatttaatttccaaccaaagaccgggatccagattcctgctgccagtggaattcctatcgcattatagaaaaatgcccagaacaaattctcatgaatgttgcgcaatgttgcacggctcatacggattgccgccggcacgtcacttaaccggctcttcatcagcacaacatccgctgcatcgattgcaatatctgtcccagctccgatggcaattcccatatctgccctggtcagtgccggtgcgtcattgataccgtcacctaccatcgcaacctttcctttttctttcagcttgcggatcacctgttctttaccttccggaagaacacctgcgatcacttcatccacacctgcctgctcaccaattgccttcgctgtgcgctcattatctccggtcagcataacaacatggattcccatattctgaagttctttcactgcctgtggactatcttccttgatcacatccgcaactgcgatcataccaaggaactgctcgttttttccaaaaaacagcggtgtctttccctgctgagccaactgttctgcctgttcttttatgctggcagaaatcttcattttgtcagaaatgaatttgaaatttcctccgtacagccagtcctctccaagttttcctgacagaccatttcccggaaccgcctgaaactgtgtgatttcaattttctgctctgcttttccattttcttttgcctttgcaagaatcgcccgggcaagcggatgctcacttttcttctccaatgcatttgcaaaaaataataattcatgttctgtcattccgtccgcagggagcaaatccgtcaccttcggttctccacttgtgatcgttcctgtcttatccagtgcgacaatctccgtctttcctgtctcttccagcgaaacagctgtcttaaacatgattccattcttcgcgcccattccatttccaaccataattgcaaccggagtggccagacctaatgcacacggacagctgatcaccagaacagaaattccccttgcaagtgcaaatccaacagactctccgacaagcagccatacgatcattgtgacaactgcaatagaaataactgccggaacaaatactcctgaaactttatctgccactttggcaattggcgcttttgttgctgccgcatcacttaccatctgaatgatctgtgacaatgtcgtatcctcgccaactctcgtcgcctcgcaacgcagaaaacctgactgattcattgtagccgcagacactttatccccttctgctttatctaccggtatactctctccggtcagggcagcttcatctactgcactgtttccttccagaacaattccatccaccggaatattctccccaggtcttacaacaaactgatctcctcttcttacctgatcgatagaaacttcctgttcttttccatcacgcaggagcgttgctgtctttggtgccagcttcataaggctctttaatgcatctgttgtctttccctttgaatgcgcttcaagcatctttcctactgtgatcaacgttaaaatcattgctgctgattcaaaataaaattcatgcatcagctccatcacacgatccatatcgcctaccgtctgcgctgctgtcatagcgaataatgcatacatgctatatccataagatgcacctgcaccaagtgcaaccagcgtatccatatttggtgctctatggatcatgcctttccatccactgataaaaaacttctgattgatcaccataacgattgtcgttaacagcagctgtgccagccccatcgccacatgattaccttccataaataccggaagcggccagccccacatcatatgccccattgacagatacatgagcggaatcaaaaaacacaaagaagcgatcagacgccttttcatcttcggtgtctccctgtctttcaacgcatcttccacacagttctgctcactttgattcatcccatgtccttcattctttgcagatttcaacgttgccccatatccagcttcctcaacagccgcaatgaccgcatctactgttgctgtgccttccactcccatggaattcgtcagaagactgactgaacagttctcaactccggggacttttccaacggccttctcgacacgggcactgcaggctgcacaactcattcccgtcacattatattgttccatcttactcctccttcaagttgtgatccggactttttgtgccggatctctcttcagatcttttatcgcatcaatttctgaagtgtcgtcacgagctcgtcaatcgtttcatcttttccatcccggatatcatctgccacacatgtccggatatggtttgccaaaagcactttattgaaactattcagagccgcattcaccgcagatacctgaatcagaatatccggacaatacgcgccttcttcaaccatccttcgaactcccctgacttgtccttcaattctactcagacgattcatcagatctttgtattctttttccgggcgatcctttgtcttgtgacaacatcccggacagacttttttttcttccattgtatttctcctgttgtataaccccctgggggtatattttctaattattaatatataccccctacaggtatatttcaagtatttttttaagttattgttcatactacgtgcggtcagtggagtgattgacacgggagtgaacagtaaccggccagcaacaacaaagaagctgtcatgaaacatttcacaattgtatctatgttccatgcagcttctctgcaattcattattatgctcgttattatatttcctgacaaatctgtcttattccacactcttgagtgactcaaccatgttgatcttctttaatttaaaatacatcactccattgacaaacaaggaaaaggccactgtcagcagaaaggcatacaggaaactcggtggatcgatatttcgtccaaacataacggaatcaatctccactgtctcaacaataaaacggtgcagaatttttccgatcaccaatcccgccagtgccccaatcaaggtcagcaggatattctctctgtaaacataagaagaaacttccttgtcataaaatccaagtacctttaatgttgccagttctctctttcgctctgtaatgttaatattattcagattatacagcactacaaatgccagcattcctgctgaaataatcaatacaataatcacgatatccagactctccagcatatgatccacctgctttttcaggcttgtcgtatagctgatgctaagtgttccatcacacttcattacattttcgccgacatcctttgcctcttctgttgtacggtcctgagttctataataaatcgaattatagtccggagcctcaccgaatgtcttttcatagacttcagatgtcatatagagataatgtcccatatagttctcacagattgcactgatcaagactgttttctctccatcatctgtatcaatcgttaatttatcaccgacattgacttccagcagtttcgctgctttttcagtcaggattgctcctttatcctccaatgaataaatttcctttgtcttccgatcccggatcacgacaaactttttgaatgcttccacatcttttggtacatctaaataaacttcctgagaagactctcctgaactgacctcaatatttttcaaaagattttctgcagtcactgataccttcttatccgcatccagttctttctggacatcatttctctcttcttctgtcacatcttcctttaaaataacgtctccatcataaagctgaatctgttcgtattgaagcggaacgattgctgaaatagaatcttttaatccaaaaccaaacaacatcatgcccatacaaccgccaattccaaatactgtcatgaagaagcgttttttatatcgcaccagattgcgcacggttgatttccacgtgaaattcagatttttccagataaacggaactcgttccagaaatactcgttttccctgttttggtgtcggcggacgcatcaattctgctgcctgctctcgtaattctttcatacaggagaacagtgttgcgattactgtacatgcaagtgccgctgcacatgctgttacagcataatacaaattatatgggatcacaacatcatacatatgacgatacaagatcttatatgcagtgataatgatatatggaattatcttttctccaatcagaattccgaaaacaccaccggttaatgtcgcaaggatcgcataccagagatattttccaacaattgaagcatttccatatccgagagccttcaaaataccgatctgcgttctctcctcctctaccattcgtgtcattgttgtcagactgatcaatgctgcaacaaggaagaaaatgagtgggaacactttaccgattgcccgcatacgatctgcattatctccatatccactgtattctgtcagattgttcctatcatagacataccactttggcttttcaagatcatcaatcttctgctgtgctttcgcaagctcttctcttgcttctgtaatctgccgctctccatcttcaatcttcttctgagcttctatacgaccttcctcatactctgcccaaccgtcttccagctcctttgttccgctgcttaactgctgctgtgcctcctcaatcttcttctgtccctcactgatctgctgccatccgctgtcaatctgctgctgaccggatgtaatctgcgcctttgcctgatctatctgccgacttgcggtaaggattgcagcatctccctgtgtcagcacatccgtcagtttctgtatattatcctgtaataccggaatacccgcttcaatctgagctatcccggcttcaactgctggaagcccttcgttaatctgcgtcaatccggcttcgatttttgtctggtttttctgaatctccgcttcggcagctttcgcctccagttccattttatccagatttgctttccattcagtcaacttctcttccattgctgttttttcagcttccaactgttctaactgagcttttaattccggatcttcttctcctgcttcctgcttccggtcgtattcttctttcagtgcctcatagttctgtagaagaagttcatactgtgtatttagttcttcataagactgttttaacggctgataaatctgctgatacgcagactgatagtcttctgcctgttgctgcaattcttcctttgctttcagaagctcatctttcttttgctgcatctgtgtctgttgcgctaaaagttcttgtctctgatcttccagactttcttcctgctctttcagttgcgccagctgatttcttaatgttgtaagtgcaatctgtttttcgctaagttcctgtgctccctgctcaacttgtgctttggactgattcagctccttttgctttgatatcagaagatttctcgactgctccagttcaagcttcgaagctgccagctgatttcttcctcgttcaagttctttctgcactgcatcaagtttctctcttgcacttgcaagttcttcttccgcctcttcttttccatccgccagatcctgctctgcctgagctaactcttcttgtgcttcatccactttttcctgcgctgtcgaagtaatctcatcatatctggcctgttctctttccgctttaattgcctgaacctttttcagcacagaatccacatgttcttcatattctttcgtaaatgcagttgcttcctttgcaccttcaacctgcactgtaatctctgtatacacatctaatgaaaatgctttctccggaacgcaaagaaaagcactgacacttccatttccgattgttgtactgcctctgtgaaatgcaatatactccggactgctgaccgtaccaacaatggtaaatgtatctgtcttaagtgtatcttccaaagaatccgaagtcccactcgataatgtgatcttatccccaatcttcagattctttccatccagataatctgcatctattacacattcattttccttttccggaagcctgccatcttctaactgaacttgattcatcttatcctggagcgccataacatgaactgctacctggtttccccgaatcgtacaaagtacatctgttgcatagcttccttctgcatccaatacaccatccacagcacgaattgcatccagatcatcttctgtcagtcccattgtactcattacctgaatatccatcaggttcttctcatcgaaatatgcatctcctgaatatctcatatccggctctgatgcacggattccggaaaagaatgcacatcctatcgcaacaataaagaaaatggataaaaaacgtccaaggctatgacggatctccatataaaagttttttcttaatgctttcttcatccacatcccctaccattcaatttcatcaatcgaagtcggattctcattagattccattcttgctacctgtccattttttatatgaatcaatcgatctgccatcggcgcaagtgcctgattatgtgtaatgataataactgtcattcccttttctctacacatattctgaagtaatttcaaaattgattttcctgtattgtaatccaatgcacctgttggctcatcacaaagcaaaagctttgggttcttcgctaatgctctcgcgattgaaactcgctgctgctcaccgccggaaagctgtgccggaaaattattcttccgttcccccagaccaacttcctccaaaactgcctgtgcgtccaacggatccttactgatctgcaacgcaagctcaacattttccaatgcggtcagattcggcacaagattataaaactgaaaaacaaatccgatgtcatctctgcggtatcctgtcagctgtttggaattataagctgtaatatcttttccatctacatacagcttcccgcttgttgccgtatccattccgccgagaatattaagcacagttgtcttacctgcaccacttggtccaacgattacaacaagttctccctgctcaatcgaaaagctgatgtgatccactgcatgaatctcaacttcacccattttataagttttcgtgatatcctgcactttaacgaattccttcatctacattctcctgactctttttctcttcttctgcatctctcctggcaagcagtctgttactcttttcttcgattctctacagacgcagtttctcccactcttctcctgcaccgaatgtctcatgaaaacgttccggaagcggtgtatcctggaataatttcttctgatactgtacgatcagactcgcagctaacggcactgcacctgaatattgccgtttcaaaaccttacaatatttctgacataacggatctggctttacactcatcactatgtcatgcaatgaatcgtattttcccactgccttcatcccaagaaacaacgcttttcgctttccagatgtcggtgccagaaacagcttatgataaaaaaccatcccttttaatgccttatagatctgctcggctgttacatctttgaaaaatggtgcgatcacttccgcatactccatcttaggatgaatatgcttcgctgtcagatagcgcaaaggatcatgataatcttccgtcagcatcattcgatccagttccatctcaatctcattatgtgaaactcttccgacctgcataattttttcaacataaggatgacattcactgtctaaagcaaaatgacagataaatccataaatatatgcacgcgccgctgccggatcttttgctttctcaatcacttcaacagcatgatggaaaaactcatcggcaaattgttcatgaagtgtatgcccctgttcattcaccggatctttctttaatgcattataataaaataagatatccggtccatgtaacccaatatcaaacaactctctatgcgcttctatagaattctgaaggggtcttggaagtgcgctgagcacctcttttccgaatttataatgtgcgtatgttgttggcataagaaacctctcctttttccgaattttcttgttaagatttataattactcatattattatattaacacattcttccctgtctgacagtaattatctttataaaaaatatgtgaaatgagattaaaaatgctaaatttttactgctttttcacttcttttaatgcaataatcacttgacatttatatttctttttactatattagtatgtacagcacacaagagaatgtgtctgttacagtagagagtatttattactctaccctgatcagggcttgtactggtttcgacagggatctcgaagatggagaagctatccgtaggctgatgcgttaaatcgcaaacttaaaattaaacgctaacgataatttcgaattagctgcagcctaaatgctgcatgtcagccctgaagcactcacactttaggaatctggcaccgactatgtgagaaacgatgacggcaaagctttgagccgtcaggcgtattatgaagctactgaacccgtaaggatgttagttttcgtacggcagagggaatgtcaaataactgactatgatagtagaagtacatgggacaggtttttggacgcgggttcgattcccgccaggtccacttttaatgaaagtgtgaagactttaaaataacggcattgtatctcgtaagatgagatgcaatgccgttattttttgaataatatccttacctccaaatggaatgcataaaacaaaaaactctgagattcttgcaaacattgacttcacaaaaatctcagagaaaaaaataatgccgcagaccggaatcgaaccgttttaagcaatcacaaatactgatagaaaggggctttgaggacttcatcacggttgcggtgttcaaaaagtgttcaaacgtttgtcgcatacaaactaaaaagttgttactttctgcatagtgtatttcctaaaatgataattactacgacatcaaccaaaataatccccaatgcaatatatacaaaaaatgcaggcaaaatattttcaagcaagcccattgtcaatgcaagaattgctataatagacattccaattcctattgttctgcataacttcttttcatcatatttttccttttcttcttttgaagccgtattatatccggaaataaaccaactcccgtgtccagaaagtaaaataatagaaaatacagcaaatatcacaaagacaatccacactatccaatcaggacctgttgctaaatctactaatttcatttataagcacctccttaaataccgatttgtctgtttcatgttatacacagtataattccattttataaaatattcaattaaaaaggtatgcgaatattttttatttccgcatacccatttatcactttattcttttacatatcgaattaactcaccaatttcacattcaaaatagttgcatagtttacagattaaatttgcgtccagtctttgaaattcatttctgcaatatctattgaaatttgaccttgggatatcgagttccttacaaatcatattcttactgatacctttttcttgtaacagttcttctattcttaattctaaatgtccataattcatgttccgcacctctacataaagtatatttattaaatctttatgtagtaattcactatatagtgaggtactatacagtcagtcccttgttaataacacaaaagaggtatgtacatgaaaaagaaaatcatagcaacaatcacaatgctctgtttactgaccgttctctataattatcttagactgccggactatcatattactaacagcatatcctttagcagtgcagataccagagatactgaattgactgtaattgtttacaaatgttggaaaattgatggattaatcaaagacattgaaaatgaacataacaaaatcaatggtacgcctaccaccttggaaatcaagctctattatccaacttattacttgcacaataatagcaaaccattccgaactacaaccattgaatataataaaaaagaatagcactctattactgcttttgaagtagtatcggctattccctctccttatattcttttgttcgtattttcgcaaactaacgttccgcaaggatgcccagtgcgacggttcctaacagggcggcgggtcgactgggcaagtggtcggctgagaagcattttctactcaacgacatatttaacgtttgattctctccgtccctcatatttctcctgtgccaacagtttatcaagaaattctgacacttcttccatgtcttcactgtctatcaaatccagttttatcaatacatcaaggtctgtctgattcttcggttgtattgagatcggctgagatgtatccacaaccactttcaactgttttgtcttatttgctgtttcaatatccgtagttaatcccataacgtggcttttactcacgccgaatatctgtgataatttttcccatatagattcatctctcggtgttccgtttccattttcatagttcgtaagcatactttgtgaaatgcctaattcttttgcaagttccgcaacggttatattcttttctttccgcaattcttttattttattcatagcaaacctcctttataagcacattatatttcatcaaattttctctgtcaatctttttatcggatattcagatattttctattgacattctgcaatgcttgttttatcataagattatcttaatatctgataatcagatatctataaggaggtgaaacgatgattagaggaaatgactttattttaaatccagacaaactgcaagaggaatttcagttagtagaagtttctgactgggtagacttttctacaaaagaaaaattaggattctactatacagttcttcttccaaaattaaagtttgaaaaagtcaaagtaggcattaaagctaacacagcgattgttaccaacgaagaacttgaacaaaaagggcagattccagtctcatttgatggattacatacttgggctagtctctataatggacgtctttctgtcaaagcagaagcttccaatatcagaaaagtgggaatgaaataatttccctactatgtcagccagtcagtgccggacaacgtcataggtgctgaactggctgacctctatacttgatatataaaacaacatcttccgaaaacaatcggaacattcattacaaaaattgggatatgaggtgagattcgtgagcaaaacaaaagagtgttttgcatacaatacgaaaatcattgaaactcctactacaaaagaagtatatatttacgaaaaccctatttttattcactcgaaagaaaaggcagatttaacagacacaagtaaccgaaaaaaatttgatgaaatgtcagctcataagcaatatgatagtttaaaacgcaagcagaagcattacgaacaggctcgttgggatattgcccgtattgttgactgcaactttgataacaaaacaaaatttgtaacgctgacatttaaagaaaacattcaggaaatcctgataactaaccgagaatttaagtattttatccagcgattaaattattatttgtaccataccaaaacccagttattaaaataccttgcaacgtgggagaaacagaagcgtggagcaatccattatcatgttattttctttgattttccgtatatagcaaaagaaaaattacagaatttatggtcacatggatttattaaaatcaatcgcattgatgtagacagcaaagaaaacagaggtcgttatcttagcaagtattttggaaaagaccttgatttgaaagaacataagaaaaaagccttttttaaatctcaaaatctgaaagttccacacgaaacaaaagtcatgctgaccgaagacattttacatgacttacaaaaagaaaatatcgtctttcagaaagaatacacaaggcaaatttacgataccaacgctttcttatctgctggttcatgcttaaaggacagccgtgttatctacatcaaaataaaaaaagaaaatccttgcgtaaagggggaatcttatggataatcccgttacgttctcagatataacattattgaatacgttagccacctgtgctaacatgaccacagatgaagtcttcaaagattttaaaattatggcaaataaaaaaatcttggagaatcacaaatatgaaatttattactcagaatcagaaaaaagctggcgtacttatttacccgatgaaaccaaacctaacaaacgccgtcctgttaagaggaagagtaaagagaaccttgaaaaagaaatcatcagattttatatcgaaaagcagaaagctgaaaaccgtcagaatatcacactggaagaattatatgctgaatggcttttgtataaaagagattatacttccgtaaaagcaaaaacaattcaagaatatgtatctgaatggaatagatttttcaaagatacagaacttgttaaaatgaagataggcgaaatcaaaccaatcacgcttatccgctttttcagagaagctacaaaagaccgacagttcacgcacaagcgagtcagtaatgcccgttctgttttgaatggaataatgagttatgcgatcgaagaagaaattatatcacataatcctgtctctgatgtgaatttcaaacagtttacctataagccagtagaagtacaaagtgacaatgtattttcccgtgatgatacgcataagttattaaattatcttcggtgtatcatagagccatattctcttgcaatacagttatctttctatctttttatccgtgttggagaaacaaaagctatccgttgggaagatattgactacaataacaggcttgtatatcttcatagacaggcgacctgtgaacgtacattgaatgatgatttaacattctcaagccgaaaagtaaaagtagtaaatcaaatgaaaggaaatacttctcatggattccgtaaacagttccttacagacgaagcacttaaaattcttcacaaagcaaaggaattaaatccaaatggaatatatgtttttgaacctaacggtgagattatgacaacagacagctttaaccgccgtttgaagaaatattgtaaagaagccggtgttccttatcattccagtcataaaatccgcttttacaatgcttcaacagcttttgacggaaataatcttacaacccttagttatttaatgggacatagtgaaacagctacaacattgcattacttgcggaatgtcaataaaaggaagaatgacaggcttgcttttcagaatcttggtatttcatcataaagtgttcaaaggtgttcaaactttttgaaacaaaaaaataagagaaacgctgtaaattcaacgtttctcctactttttacttaatgccgcagaccggaatcgaaccggtacgggtatcactacccacgggattttaagtcccgggcgtctgccagttccgccactgcggcattcctcaaaatactttcgcatcttgaacgacccagaagagactcgaactctcgacctccgccgtgacagggcggcgctctaaccaactgagccactgggccaaatatttaattgtcagctcgctgccccttactacttccaagcagtctagctaagtggaccttcggggactcgaacccaggaccgaccggttatgagccggttgctctaaccaactgagctaaaggtccaattgattatttctgttcctaagaacaagccgatgatcggactcgaaccgataacctgctgattacaaatcagctgctctgccaattgagccacatcggcataaatgaccccgacgggaatcgaacccgtgttaccgccgtgaaagggcgatgtcttaaccgcttgaccacggggccatactttgtctgtcaacttcctcaacagcgattataatcatatcatataaatcaccgtttggcaagtacttttttgatatttttttaatttttgaaacttttcaaataattcgacaaatcgaacttcttagtttgctactcctgatccgataatcagagaataaaaagaccttacatttctgcaagatcttcaagctccccctgttggacttgaaccaacgacacttcggttaacagccgaatgctctaccgactgagctaaggaggaatatttaattaaaggttatgtaccttcaaaactacatacagtcaaaaccaacatcatcatccaaacctatcactgctttggttatgccctcgacctattagtaacagtcagctccatgtgttaccacacttccacctctgccctatctacctcgtcgtcttcaaggggtcttactaacttgacgttatgagatatctcatcttgaggggggcttcacgcttagatgccttcagcgtttatcccttcccggcttggctactctgctatgcctttggtaagacaacagatacaccagcggccagtccatcccggtcctctcgtactaaggacagctcctctcaaatatcttacgcccacgccggatagggaccgaactgtctcacgacgttctgaacccagctcgcgtaccgctttaatgggcgaacagcccaacccttgggacctacttcagccccaggatgcgatgagccgacatcgaggtgccaaaccactccgtcgatgtgaactcttgggagtgataagcctgttatccccagggtagcttttatccgttgagcgatggcaatcccactttataccaccggatcactaagtcctactttcgtacctgctccacccgtcggtgtcgcagtcaagctcccttctgcctttgcactcttcgaatggtttccaaccattctgagggaacctttgagcgcctccgataccctttcggaggcgaccgccccagtcaaactccccacctgacattgtcccccagccggatcacggctgctggttagaaacccagtactgcaagggtggtatcccaacagtggctccatggcaactggcgttaccacttcttagcctcccacctatcctgtacatgcaataccgaatcccagtatcaagctggagtaaagctccatggggtctttccgtcctggcgcaggtaaccagcatcttcactggtatttcaatttcaccgggtgcattgttgagacagtgcccaaatcattacgcctttcgtgcgggtcggaacttacccgacaaggaatttcgctaccttaggaccgttatagttacggccgccgtttactggggcttaagttcaaagcttcgcttgcgctaacctctccccttaaccttcccagcaccgggcaggcgccagcccatatacctcacctttcggttttgcatagacctgtgtttttgctaaacagttgcttgggccaattctctgcggccatcttactggcactccttctcccgaagttacggagtcattttgccgagttccttaacaatgcttctcccgtcggccttaggattctctcctcatccacctgtgtcggtttacggtacgggtatcctgcaaacaatagcggcttttcttgacagtcagctcacgtgcttccctacttattttcagtccacatcacgtcttcagattaaagagcggatttgccaactcttctcctacctcgcttgtaccggtctttccattcccggctcacgctctctgcctgtgtccccacagttctgttacaggatagtacaggaatttcaacctgttatccatcgactacgtctttcgacctcgccttaggccccgacttacccagagcagatcagctttactctggaaaccttagatattcggccggaaggattcccaccttcctctcgctactcattccggcattctctcttcttaaaagtccacagctccttacggtactgcttcgtccctttaagaatgctcctctaccaattgaattaattcaattccaaagcttcggcagtgtgttttagccccggacattttcggcgcaggacctctcgactagtgagctattacgcactctttgaatgaatggctgcttctgagccaacatcctagttgtcttcgaaatcccacatccttttccacttaacacacattttggggccttagctgttggtctgggctctttcccttttgaccacccaacttatctcggatcgtctgactcccatacatcatctacacggcattcggagtttgatatcccttagtaagctttgacgcccccttaggaattcagtgctctacctccgcaagactcgtatgaggctagccctaaagctatttcgaggagaaccagctatctccgggttcgattggaatttctcccctatccacacctcatccccacccttttcaacggatgtgggttcggtcctccattgccttttacggcaacttcaacctggacatggatagatcacccggtttcgggtctactccgactgactatgcgccctattcagacttggtttcccttcggctccggacctttagtccttaacctcgccagccagcgtaactcgccggaccgttctacaaaaagtacgcggttgagcatataaagctcttccacagcttgtaaacatatggtttcaggttctttttcactcccctcccggggtccttttcacctttccttcacagtactatgcgctatcggtcactaagtagtatttagccttacggggtggtccccgcatcttcccacaaggttccacgtgtctcgtggtactctggatcccgccatgtcaactcgtctttcgcttacggggctttcaccctctctggccggctttcccaaaaccgttctgctaaactcgttgaatcaattccgcggtccgaaccccagcatgcacgcacgctggtttgggctcttccgttttcgctcgccgctactcacagaatcacatgttgttttctcttcctccggctacttagatgtttcagttcaccgggttcccttccttaagttatgtattggcttaaggatacttgaggtttgctcaagtaggtttccccattcagaaatctccggatcaaaggatatttgctcctccccgaagcttttcgcagcttatcacgtctttcatcggctcttagtgccaaggcatccaccatacgctcttatcagcataaccaactcgacctcatcccacgggaatgggataacgtccacacatacatagcgttgtatgcgttggtgatagtcaatttattttaagtctgttttcttcagactgtaagttaatgttgttaacattacctcggatgtcttgattagatatttatctaaatctattgatttttactatatgcagttttcaaggtacataaagatgcgagcgcattgaacgctttttgcatcctgactgactttttcatcagtcattagaacccaaaatctttttgaactctaatcactggtgaaaccagctatcataacagcactgccctgctgattgggttggcggcgataagttgttgctcatctgtgcctgtatctatatattcaacttcggcagcgtctctgccttagtttctttttttatgatttggcggccacctactctcccacaccgtctccagtgcagtaccatcggccgcttaggtctttaccatcgtgttcgggatgggaacgggtgttacccctaagcgcatcgccaccaaaaagttcaggttacttgataacccaacaatagacaacagtaaaacagcctctacttttttcttccttagaaaggaggtgatccagccgcaccttccgatacggctaccttgttacgacttcaccccagttatcgatcccaccttcggcagctccctccttacggttgggtcactgacttcgggcgttactgactcccatggtgtgacgggcggtgtgtacaagacccgggaacgtattcaccgcgacattctgattcgcgattactagcgattccagcttcatgtagtcgagttgcagactacaatccgaactgagacgttatttttgggatttgctcgacctcgcggttctgcctccctttgtttacgccattgtagcacgtgtgtagccctgctcataaggggcatgatgatttgacgtcatccccaccttcctccaggttatccctggcagtctctctagagtgcccggccgaaccgctggctactaaagataggggttgcgctcgttgcgggacttaacccaacatctcacgacacgagctgacgacaaccatgcaccacctgtcatccctgtcccgaaggaaaggcaacattacttgccggtcagggagatgtcaagagcaggtaaggttcttcgcgttgcttcgaattaaaccacatgctccaccgcttgtgcgggtccccgtcaattcctttgagtttcattcttgcgaacgtactccccaggtggactacttattgcgtttgctgcggcaccgaacagctttgctgcccgacacctagtagtcatcgtttacggcgtggactaccagggtatctaatcctgtttgctccccacgctttcgagcctcaacgtcagttaccgtccagtaagccgccttcgccactggtgttcctcctaatatctacgcatttcaccgctacactaggaattccgcttacctctccggtactccagattgacagtttccaatgcagtcccggggttgagccccgggttttcacatcagacttgccactccgtctacgctccctttacacccagtaaatccggataacgcttgcaccatacgtattaccgcggctgctggcacgtatttagccggtgcttcttagtcatggcatcgtcattttcttccctgctgatagagctttacataccgaaatacttcatcgctcacgcggcgtcgctgcatcagggtttcccccattgtgcaatattccccactgctgcctcccgtaggagtttgggccgtgtctcagtcccaatgtggccggtcaccctctcaggtcggctactgatcgtcggcttggtaggccgttaccccaccaactacctaatcagacgcgggtccatctcataccaccggagtttttacccctgcaccatgcggtgctgtggtcttatgcggtattagcagtcatttctaactgttatccccctgtatgaggcaggttacccacgcgttactcacccgtccgccactcagtcaccaggatcttcatccgaagaatcaaatcaaggtgcttcgttcgacttgcatgtgttaagcacgccgccagcgttcatcctgagccaggatcaaactctcgttaaaagtgtttgtatccacttcagaaccaactaactagctaattcttccctttttactgttgttttggtttgtttaaaaaccgttcttaaaaatcttctcttaaagaaattttcaagggttgttgttgtctattgttcagttatcaaggttctttgtttgtgtcgttcttttcaagcgacagcttgtttatactaacatagctgtttttgtttgtcaagaactttttttaaaaagttttatgagttttcataaaacaaacggagaaggagggatttgaaccctcgcgccgctactaacgacctactccctttccaggggagccccttcggccagcttgggtacttctccataaaaaacggagagggtgggattcgaacccacgcgccctttcggacaaacggttttcaagaccgcctcgttatgaccacttcgatacctctccataatacctaatcattgccgattagcaattcttattaagttgttgtcgtttcacttgcgacgctgataatcttatcataaggtagacctaaatgtcaacaccttttttttatttttttcacatttttttgattttctttgttttccttgatttttggggctttttccacactttacagcatcggaaaatccccctcttttcttgaattcccttgtatattcctacagaaacgcttccgccacaagaagatcttccggtgttgtgatttttatattttcatatgctccgggatataatttaacagtatgtcccatcatctgctcgactaccatcgcatcatctgtcgcattttcgattttctcgttgattaatttctgataagcttctttgatcagctggatattaaaaacctgtggtgtctgaacaagccagagtgtttttcgctccggtgtgcctttcacataattcttttcatccacgactttaattgtatcctttacaggcatgccggcaacacatgcattcgtttcttccacgcaagaataggcgcgctcaatcatagcatcatccacaaaaggtctcgccccgtcatgaatatatacgaacccatcttcttctgttatttgctgaagaccattccaaacagaattatatcgctctgctcctccagatacaattttgcgtacttttgaaaaaccgtatttttctacgatttctttttgacagtattcttcttcccctgcgccactgacaagaatgatctcatcaatccacgcagaatcctgaaatgctttcagagaataataaagtacaggatagcctttcagcatcaagtactgtttatgaacttttgtccccattctttttccacttccgccagcaagaacaactgctgtacaatatttcttctccatttttctctcctgttattcacattaaatacaggattttgcaaagttattcacaactcatcacaaaatcctgttcatatctctttgttattcaaataactgacacgtaaatcaactttcttaacgttcacccaatttcaggttcggcacagcattcaaatcccatcccgaacgagttccggcaaggtattcataataagccgctgctccgatcattgccgcattatctgtacagtaaatcggtgacggacggtagaatttcattccacgtttctcacaagcttcttccatcgcttcacgaagcgctgaattagacgcaactcctcccgcaatcgcaaatttcttcatgccgagtttttctactgcacgcattgaattacccacaagaacttctactactgccttctggaaagatgctgcaagatcggcaggatcaaatgtctcacctttcatcttacagccattaatataattcaataccgctgatttcagtccactgaaactaaaatcatactctgcatcatttacctttgcctttgggaactggattgcatccggattcccctctttggcaatacggtcaatctttggaccgcccggataaccgagcccgattgcacgagctactttatcataagcttcacccgctgcatcatctctggttcttccgaggatctcatattttccatattccttcacacatacaagatgcgtatgtccgccggatgcaacaaggcatacaaacggtggttcaagatccggatgttcgatataatttgcagaaatatgtccctcaatatgatgcactccaaccagtggaatatctttcgcccatgcgattgcttttgcttcagccacgccaacaagcagggctcctacaagccccggtccataagttacaccgattgcgtcaatctcatctaatgttgtccctgcttcactaagcgcctcttcaatcacctgattaatcttctcaatatgctttctggatgcgatttccggcacaacaccaccgtataatttgtgcagatcaatctgagaagaaataatatttgagcgcacttctcgtccgtttcgtactactgctgccgctgtctcatcacaggaactttcgatcgccagtatattaatctctttgctttcactcattttctatccctctcaatcttcaaacatcagatcaacagacattccatcctttccagctttcgcccgagggaatatctttttcacatcattcatataatgttccggctttgtaagtgacgggctataatgtgtcagccacatctcgccaacattcgcttctttcgccagttccgccgcttcataaaatgtcatatgcttatactctattgccttcgctgctttctctttctctccatacatcccttcacagatgaaaagatcagaatctttcgcattctcacgaatcgaatctgtcggtcttgtatctgttgtataagtcagcttaattccttttctctgtggaccgagcaccatatccggtgtcaaaattcccatttcactttctacagtttctccgttctgtaagcgactccagtatttctgcggaatctcatttgcacgggcacgctccacatcaaacttaccggcgcggtcaatttcaatcgtataaccataacaaagtacattatggttcacacgaaatgctttcaaccggtatccatttaactcaaatgtctgctccgctccctgaatctcctgataaatgattggaaatggcagttccggcgcaattacgcgcaggcagctgacaaccctttcaagacctttcggtccgatcagtgtcaacggttccctacggtctgcatttcccattgtaagtagaagacccggaagtccactgatatgatccccatgataatgagtaaaacagatcacatcgattggtttaaaactccagcccttctcttttacagctacctgtgttccttctccgcagtcaatcatcagactgcttccgttaaaccttgtcattaaggaagtaaggaaacgataaggaagcggcatcatcccaccacttccgagcaaacatacatctaacataatattcctctatcttctggtccattacggtttgcccgaaactgcaaaccagactctttcattcatctttacattcggttggaatgaggaacccctttgtaatttcatcaaaacactcctcgcacagatcaaaactgcagctttctccatcttttccagaaaaatagccccaggtatgctctacatgaagcatctctcttttcggaatcccactcacaacttttgtttcttttccacaccggttacaaataattttcgtaatttcttttgtttctttcaactgatactggcgcatacgttttcctcctgtgagcagcaattatgttgttactcatcattgtaatttacaaaaacggaatattcctgttttcttcctttgttacgcctcaattatacaaaacagtttttgcaatttccactggaaactgctggttatttatctatttccagactcatcagtactgcatcttccttcggatcctgatagaatgctttgcggactccatcgtttacgaatccttctctcgcataaaatgctcctgctgcctgattactttctcttacatccagcagaacctttgcaatctgatgttctttactccacgccttcaaagctagcattaatgcatgaccaaccccctgacgtttcatctcatcaatcactgcgattcttgcaatctccacttcatcaactgcagtatagccaagcagatatcctactcttttccctgctttttccgcaacaaagcagacactattgttctgttccagcgtctctagaatcgccttctcgctccaggcatcagaaaatgactggtgctcaatctcagcaactacagcaccgtcttcaatcgtcatctcacgcacttctgtctttgcttccttttcacgctgagcacgttcgcgctctgcctgagacacacgcagataatccggcttatgcgcctctgctgtctcatattttcctgcataataatacgcaataccaagtgctcctactacagctgctctctgacggttcatgtatgatggggcaaatgaatacgggacttcaagtccctcttcaagcatctgacgatacaccggtactccgtctcccaaaaatacaaccggacgtttatacgcattcagcttaccgatcaactcttctactgcaatcgccatctgctgttcttccacatgaaatgcagcctctgtcagatgtgttccatctttcacttcatgtgaaaatgaatacaatcctgtataaacctgttttcttctggcatccatgatcgggcagatcaagtcgccacatccataaacattataggccagtgcatccactgtcggaacatggatcagaggttttccaagagcaagtcccagccctttcgcagtagcagatccgattctaagcccggtaaaagagcccggtcctcctgacacagcaatggcatcaatgctggacagatccagatcgatcatcttctttacctcatcaatcatcggcagaagtgtctgcgaatgtgtcttcttataattcacggtatactccgcaattgtctgttcatcctcaacgactgcaaccgttgctgtcagtcctgagctgtctatcgccaatactctcatggtcttgcttccttcctctgtcagctgctgtaaaaatgttctctgtatcaacagccttctctttgttccattcttctaattttttatcgttattgttcctcgattgtgatccgacgataatcaaatccctgtgtcagatccttctcgatcagaatatttgtccgacgttccggaagaatctcttctatcagattcgcccactcgatcagtgagacaccttctcccatcacgtattcttcatatcccacctcgtccatctcttcaatgtcaccgattctgtagacatcaaaatgatagaaggggcagacgccttcttcataaacctgaacgatggtaaatgtcggactattcaccggttcttcaatcccaagtccttctgcgagtccctgagtaaagaccgttttcccaactccaagatcccctgtcagggttaacacctgacctgggaatgctttttcaccaagacttttaccgactgcaaatgtctcttccgggcttcttgtctctattaccataatatttcagcctttctataccgccggttcttcaccaaaagtcccggttcttttatcatcttatcttaagtttctaatgatggaacagacggattcctgtaaatgccattgccatgccgtatttgttacatgtagcaattacattatcatcacgcacagatccacctggctgtgcaatataagttacaccactcttatgtgcacgctcaatattatcaccgaatgggaagaatgcatcagaaccaagcgcaacacctgtcagctggtccaaccatgctctcttctcttctcttgtaaatacttccggttttaccttaaatgtattctcccagacaccatctgcgagaacatccatatattcctctccgatgtaaagatcgatcgcattatctctgtctgcacgtccgattccatccttgaactgtagtccaagtaccttcggattctgacgtaaccaccagttatctgccttctgtccggcaagacgtgtacagtggattcttgactgctgtccggcaccgattccgattgcctgtccatcttttacataacatacagagttagactgtgtatatttcagtgtaatcattgaaatagcaaggtcgatcttcgctgcatccgggatctctttcacatctgtcacaacatttgagaagaaatctttatcgatattcagttcatttcttccctgctcaaatgtaattccgaatacttccttgtgctctaacggtgcaggcacataatccggatcgatctgaataatattgtaatttccttttttcttctgtttcagaagttcaagtgcttccggctcatatcccggtgcgatcactccatcagatacctctctcttgatcaggcgcgctgtatcaacgtcacagacgtcagacagagaaataaagtcaccgaaagaagacatacggtctgcgccacgcgctcttgcataagcacatgcaagtggagagagctctccaagatcatctacccagtaaatcttcgccagtgtctctgacagtggaagaccaacagctgctccggctggtgatacatgcttgaatgaagttgcggctggaagtcctgttgctttcttcagttctgataccagctgccatccattgaacgcatccaggaagttaatatatcccggacgtccgctgagcaccttgattggaagctctctgtcgtcgttcatgtaaattcttgaaggtttctggttcgggttacatccgtatttcaattctaattctttcatctgtctttacgctccttatttgttcttattcacgatctttgtctcatagttacctgtctcgatatcaatgtaacggacaaataatgacactttattttccccattcaggctgttccacagaaggtctgcaaactcttccatgttgtccagcacctctaccagcttcggttctccctcaaagcttggaagcgggttgccatcatgcatataagtgtgaataaaatgagcttcaccggctgccggattctcgtatgcaaaagtatatctgttgcaactgtccgggtttccgttattgctcttcaggattgacattgcataattgaaattgccattctcaatatgcatcacaccagaaatacgtggtgtgtagttcggaccatccggctcgaattctctagaacgaagagactgctcaaaagtaagctgcttatccattccttcataaatcgtatctgtctgatccccgtttgttacgatcgtcttattccccaatactctgaccggtgcgtaaataatcagacttgggtctgtaagcttcgatggatcaaatgcctgtgtacggattccctctccgtcctctacaaacacacggtttctactgttctcactgcgtcccataataaaataggcagtgacagccttctttccatccgggcttttaccaataataattcctcttcctggataagagttactcttaagttcctgctcaatcgacagcatcttcattgttgttctcctttcggtacgttcgctttcttgacaatctactagaaaaaaacgaaaaacttctcctaaaataatagattcaggagaagtatatcatgcacatgcttttttcgcaagtccaggcccgacagctattgaatgaaaaatcctgattttccgtagcttcagacctctttctattaaattctagtaactattcactctttttgatcagttctgtcatctcgcctgccggaattccaagaacataattcatttcactcgaaagcgcatgttccaaaagcatctgatatttcttatccatgcttgtcatgctgcctcttcgttttgttcggctatacaatgtcttcagcactttgacccagttctcaggacagaagcttgaaatacaatccttatattcctgttctctgtacttttcattctttacattcagtataccaacctctgcaagatgatccagcagttccttcgctttctgctcacttaccggacgacggatgttcttatcgtcatcaatcggaacatacgccttatctctctgattgtctatggattgtaatgtataataatctttcttgccatccacaaatgaaaaatccagttttcctacttcttctaccttgtacactcctctgcacttatatacaactgcgtctcctctgctgagcattttcaaaacctcctgttctttttatttacactgttgttgtccacaatgtactgccctttttataacagactctacatgtgtagtataacattttttcagtattattttaagagatttttaaattttcaaacattttcgtgattattgcataattcacatgcagctctatttgtgcaatttttagaatacttttgttgtccactggctcatatcccacacttcatcaaccacatcctgataaaattcaggttcgtggcagatcagaaggatacttcccttgtactcctgtaatgcctgcttgagagagtcctttgcatccacatcaagatgattcgtcggctcgtcaaggagaaggaaattcgtatctctgtttaacaacttacagagacgcacctttgcctgctctccaccgctgagtacacgcacctgactttcgatatgcttcgttgtaagtccgcattttgcaagcgcggaacgcacctgatactgtgtataagaaggaaattcctgccacagttcctcaatacaactattacgattttctccttttacttcctgctcaaaataaccaagttcaaggttatcaccaagttcaacacttcctgataaagaaggaatcaatccaagaatactctttagcaatgtagtttttccaattccatttgttccaacaagtgcgattttctgtccacgttccatagagaaattcaacggtttagataatggttcatcatatcctgtcacaagatccttcgtctcaaaaagcatcttaccaggagttcttccatatttgaaatggaattccggctttggtctttctgccgcaagctcgatcacatccatcttatccagctttttctgacgggacatcgccatatttcttgtagacacacgagctttatttcttgcaacgaaatccttcagctcgctgatttcctgctgctgacgacggtaagccgcttccaactgtgctttcttcaccgcataaacttcctggaaatgatcataatcgcccacataacggttcaattcctgattttccatatgataaataatattcacgacttcatttaagaacggaatatcatgtgaaataaggataaatgcattctcgtagtccagaagataacgcttcagccatgcaatatgctcctcatccagatagtttgtcggctcgtcaagaagcaggatatccggcttctcaaggagaagtttcgcaagaagcacttttgttctctgtccaccacttaagtctgtcacatctctgtccaatccaagatcaagtaatccaagtgcacgcgcaacctcttctaccttcgcatcaatcgtatagaaatcatgcagtgtcagttcatcctggatcgtaccaagttcttccatcaacgcattcatttcttcctcatctgctgttccaagcatatcacagatttcattcattctctgctccttctgaaggagtggatcaaatgcggatttcaaagcctgacggatcgtcattcctttctcaagaactgcatgctgatccagataacctgcatgcacattctttgaccactcaaccttcccttcatccggtaacattttccctgtaacaatactcataaaggtggattttccttctccgttggccccgacaagaccaatgtgctctcctttcaaaagtcggaatgacacatcattgaagattgcacggtctccaaatccatgtgtcaggtgttctacatttaatatgctcatatcgctctccaatcgtattcttgtttcttctcttgattttgtattttacttcttattcctgatgactctccagccatttcactgcacactgtgccagacatgccacaccgatcgggcagacatcctcattaaactgtaccttcggattgtgtgccggataagttccccgctcgtccgtataacctgctgagagatacataaatgtactcggaactttctctgcgatcactgcaaaatcttccgatgcacttgcactcacatccggaaccggagtaaggcccggaatatccatctctttcatatatccaatcatttcgtccgtcaatgccggattgcagatcagcggcgggacttcggagatcatctcgattttcacactgccattatacacagctgcggtcttctctgccacttctttcattcggcgaacaagaagttcgcgctctttcgtattgtttgtacggatcgttccctgaagaactgctgtctccgggatgatatttgccgcctcgccggccttaaactgtccaattgtcagaacgcatgcgtgcgccggatcagtctctcttgcgatcaactcctgcaatgcaagatgaatgtgtactccgatattaatcggatccacacccgcatgaggataggctccgtgagaacctttccctttgaccgtgattttaaatccatcaacagaatacatcattgtgcctttatcattatacataaaaagtccgaccggcatctttcccggagatacatgatacgcaagtgctgcatctaccttcggattctcaagaatcccatgctcaatcatattcttacttccctgaaatgtctcttccgccggctggaacatgaatttcacagttcctttcaacttgctttcccgttcttttaagattcttgccgcactcaaaagcattgctgcatgaaaatcatgtccacaagtatgtgctgtttttcctgttggacaggcaaatgcttcaccactttcctccggcatcggaagtccatccatatctgcacgcaggagaagaaccctaccgccatttccaagcattgccgtaactccctctccgcattcaaccggatccaaaccatactctttcaacttatccatcacataagctttcgtcttcggaagctcaagtcctgtctctgcattctgatgaatgtatcttctgtctgctactgtttcgtcttttaattcaagtgctctcttgtagaaatccatcgtgattgcctccttgtgataaatatatttttctgcgtccatttttcccaggcgcttttgtgattataacactattttgatgcttatgcactaaaagaatacaccccagatctgcaactgcttttttgcattttttaactatgctaaccactgggcaggcgtctgcatcaacaaatatttacatcatcatttccacactttccatctatatatggctaataacggaatccggatcatttttatcgaaacaaaccttgtctccttcattgatattgtttttataaagcagggcatcctctgctttcaccctcaattcttctccggatgaatctacaagtgtaaccactgccataaccggagcgtctttggctcgttcttcgcagccaaaatctaaatcttcatcgattctctttactgtataaatcatactaatttatcctttacttttcttatttccacgctttccagacatccggctgatatcctaatgttgattgctttccatttctgacaaccggagtttttattacctgtggattttcaagcaccttttcaagcttatcttcatctgtaatatacttaatgagagcaagaagatctttgtcttttccttcccagttgatcatattttctaatccaccattcacctgagcaactgaattgaattcacccttactcatacctttttctttcatatcaatgaactggaatttgattccacgttctttgaaaaaccgttctgctttcttggtgttattgcatttcttagttccaaaaatctgtatgttcatttcattttcctcgtatctttatatattctgcttagtttgatttctatatcaatctttaacctctatgcctgtaaattcgctagctaatctgcacagctctgccgatccatctatcgctgtcacttgatatcctttctctaggaaatattttgtgtcgcgaccagaaccacaaccaaaatcaagaatcgatgcattcttatctatcaatcgaagaaatctttcctgcgttggatgcatgtctgcattctgcgtattcgctataaagttttctgcgttttgattataataattgattgtgttattcatttagttatctccttaaaatcgttatataaaactcacacataacacttccatgttatttacttaagaacttatataaaaattattatataatactttcaagtgttttgcgattaaaatccatacaattaaagcctatacaccttactgaagaagaagcaatagaaaaagctgaagaaatacgtgataatttagttataggtgctgaaattatatcatcttttgatactttaaattctgaaactgattatgaagaactttataaacaattagaaaacatccctggtatcaatactgtatggcgaatgaaatattatcacttattatttccaactttattagcacctttttacggacaggatatccaactgaaagttttgcattttctcaaacaaaatcctagtagcattccatttattcgtatgggacaaattgcactctttattaaaaaatgcaatattcctggaattgttttcgatcatatttggggaaagtacgctaatgacgcaaacactgttgatacctctgatacaaatacgctttccgataaaaaacggaaaacccactattggatgtatacagtctttgatgataacagttggctcgagtgtcaggaaaaaggtgtcatggttttgggcatggaatttcgcaaacaccctatccgtcaatgatgtaatttttgcaaaacgcttaaccgatattactccatatactgattatatcgaaaaacttactgctatctttgctccagatgaactagatgatattgatactcttcctgaaataaactatcctgcttattcttctacaaactttctttctgatgtatacatgaccagacatgattatgataccttggtagatgtattaaaaatgaagaaaaatattattttacaaggtgcacctggagttggtaaaacatttacagccaaacgacttgcttattccattattggctcaaaaaatcctgaacgtgtacaaatgatccagtttcaccaaagttattcttatgaggattttattgaaggataccgcccaacagaaaacggatttacaattaagaaaggctctttttacaaattctgtaaattggccgaggaagatgatgaaaatgattatttctttatcattgatgaaattaatcgtggcaatctaagtaaaatattcggcgaattattcatgttgatcgaaaaagataaacttggagataaaatctgacctgctgtgaaaatttctaataaaaaaataggagtagagtaatttttacatcccataatatgcatgattttgtccggccatcaacgctttgattatgcccagaaggcgttaaagcttcattgtgccagctatgttttaaaacctatagataagacacaattatgtgatgacaaaaaaataaccggtattactccgcagcaataccggtctgaataaaatttttattatctatcgaacagaaaacactttcgtcccgtgtgcaggtactacgacggttaatgcttcctttccgctatgtaaaacctcaccactccacagctcggtaaattcataggaatccttatccggttcccgtcccgacagctcttccatattcgaacagatctcccgatcagtatcactgagattaaacagtgctgccgtaatcatgccggtttttgtgcttgtatttttccaatcagcctccccatctgatcttcgcagctgttctcccctgaagtcctcggaaagtaacaccaacagttctttattagtgagaagactcaatgtaaaatcatccattttggtaagctcggcaccaatcatcagcggagaacggaacatgcaccatagtgtcatcatggtcttctgctcttccctggtaaacagacagtctctctcctgtctcaaagcctttaccgaccttgccgagtggcagcatatcgcaatccgggaaacagccctcttttacatgatcctgccatagctcacatctccagaacatattcttaagaagctcccagttatcccagaaatcatccgtaatacgccacatgtttgcatatctgcaatactgccacgcacggtcaatatgtgcaggaccaggggaaaggctgagtacaattttcctgtttgatttctgaatagccttgtataacatttcgttttcatgccatccggaaaagctgtcattccgatatataaagctgtcacagatatcatcacacttaataaaatcaacaccccgggaagcatacatctctatcagggaatcataatagctctgacctgcttctgtatttctcactccatacatatccggattccatccgcagatcgaggacggatctgccaccatgtctgcggtaaaatttgagtaaattccgacacttattttatgcagttctatctttatgagatttcatcaacatcataatacttaaaatctcggaagtaggcacttcctcctgtttcctctgccgcatagcagaacagaccaaaccggcaaccagtaaaatgatccagtttgaagtacagcttatgcacggttccgatgggtagccagtctcccttatttacccggtaatagcagcgtgcttcatccttcatgttacagaaatctgcttcaagacgaaaatccatctggtgtgattcaacaacagttcctcccgtcatatccaatataccatcttcttttttatccagcataaggacttcatattttccatgatgttttgtaatgccaactgcagcataacagctctgcaacgcacacaaacctgcgacatcgccctctttcaatgcagaagcatcaacagtaacctcagctgcgcaggacggataactcatcctttgcgtaagcgtatttactgcctgtgtaagctctgtacaaacttcccgtgttgtaattgtataggttccctgcaatgcatccagatgatagtaccgtggatctggatcatgattaaactgccagcgcggaagcagcccattacagaaatcatcacttcccactaatggctgataaatatatcctggtctggtactgtgaacctctatttcttccggcacatgtccgttctgtccaaaaaacggaaaatgatccttccaggtaaccggaagcagaataggaatccgtccaactgctccggaatcctgaaacagcattgcataccactttccatccggcgtatccactattcctccctgtgccacgccctgtccacaatatccacgatcatcacaaagtacatctccacccgtgaattctccttccagagaatcactgtaaaagcatgcttccgtccgcatccagcggtctctcagggaatgaaccagaaaaatataataatagccgtttattttttgaatatgagaaccctcatagcctagctccgggttcttatgatcactgactaaaagacgatgtaatccgtccttctttggtgcagtcaaatcttcattcaattctgtaatccagatttcatcatttccatatacaatatagtttctgccatcctcatcaaataataaagagccgtcatgataaaagccttctatcagctgcttcttccatggaccatctattttttccgaagtatacaaataagtcttacgggtatcatttgccacaaagcagatataaaatcggccttcatgatagcgcagggaagctgcccacatgccctgtccgtaaatattctgaccgcttttcagttgctgcgcatccgtatgatccaacatctcatagacataagtcacatgctcccagtgcaccagatcaaaagactgctgaatctcacagcccggcataaagtgcatggttgtggataccatataataggtgtcttctacgcggatcacgtccggatctggataatccaatcttgttataggatttacattcattgtttattcctttctgttttatctccatattctttctttgttctattctatttttactattttatctttgtttcttatccgtctgccttttcaactcttcttgccataataaaaggcctcctatgatttatattttaccatagaagaccttgctgttattagctatttacagaaaaagtttcacacactctttacatccactcctattttgtttttactattttcaagacatgtaagactagaggattcatcctattttatacttgtagaaaattctaccatttaggaacactgttaggacaatgtttaacagctatcgctgcacgcatctcaacaaagcatccgcaaatcctacatataccattcaacaaattcgtacattctccgcattttttcaatctgcgctcatattctgaattggaaactttatcatcttctgaaagattggaaatatagcgatacatattgtgaaaaaattctttttcagacatatcttttaatagacattttctgcataatcgatgctgctcactccccacaaccattctacctcacttccagatgcaggacactgcacgccggaatcgtaaatcgaattcctttttccgtaatctgtgtgccatcatatttttttactgtaacacactccggttcttcaaaagtattttttgcgtgtatttcccccgtaacaatttctccttttactgtttttacacttctatcaataatcgtagtatctatatcaaaactttgatcgacagaaagatttgttatagtaagatggagtgttccatccgctgtttctgagacagattctgtcagattcggtaccttccactcttcttccaccccaatcatctctgtctcaatactgctctccacaagattcgaatcctgatgttctttatagatgtcaaagacatgatatgtaggcgtcttaatcattttatccccctcagtaagcagaacagcctggagtacgttaacaatctgtgcaagatttgccatcttcacacgatcgctgtgtttattaaatatattcaatgtgatccccgctacaagtgcatcacgcatcgtattctgctgataaagaaatcccggatttgtacccggctcacatgtataccacgttccccattcatctacaatcatgcctatttttttcagaggatcatattcatccataatcttaccatgtctgcgaataagttcatctatatacaccgccttattcaatgtcttataccagacattttcatcaaactccgttgagcttcctttgatttcaatcccttctggatatacataatagtggagagaaagtccatccataaatccatgctgttcttcggaagttctacggaaacaggttgccaatacctctttcgtccactcataatcttcgtgtggtgctccgcagcaaatcttttgaatatgatcttcattattatagtcacgaacaaaactctgatatctgcgatactcatttgcataataatctgggttcatgtttcccccgcatccccagttttcatttccgattccaaaataatcaactttccatggagcttgttgaccattctttcctctcagttcggacataggggatattccatcaaatgtcatatattctatccactcagacatttcacgaactgttccacttcccaaatttccattaatatacgtttggcatccgagctgacggcagagctcaaaatattcgtgtgttccgaaactgttgtcttccaacacgcctccccaatttgtattaatcatctttttacgtgaacccgcaggacctattccgtccatccagtgatactcatctgcaaaacatcctccaggccaacgaagcactggaactcgaatctctttcaacgcttcaactacgtcagttctcattccattcacattttcaataggtgaattttcccccacataaattccttcataaatacatcttcctagatgttcagaaaaatgaccgtatatttgtctgttaatcctgctcagtttcctgttcggattgattaccattttagtcatcatgatttcctccttctatcttttcatattgccggaatactcttataaaaagcagtgaatttatatatgcacagactgaaaatccgccaaccatcataaaaatccaaataccttttgtaaaaatcataagcacaattacaattacatggatcagagtcagcaaaaatgtctctctcagattaaaaacagccagcatcactgcatttttcacgcttttaaaaatagtattatcgaatctggctattaaagcaaatacataaagaagtgaaaaaataaaaataactgcaaatactcccgtaatcacgagaatcacctgattgactgttgaaaattccggcttttctatccaaaatttcactccaaaaacaaaacttgctccgattattaaatacaagatggataagagaaacgcctgcttgaaattatttttaaatgctttgaaaaaaggtttgaatatatatccaccctcatgtcttgcctcgcgcatagtaatcgtgtaaagagcactgactgccgggccgatcgtaatgaccggcgcacagcataaaatgaacagaatatttaatatcataaaatctgcaactgtagttaaaaaaacaataacaggactgtccagattaatcttcatagctttttccatccttaagttcagtctacctttttctaaactccaccttaacaggactcatacccataagttcctcgcttttcgcatcaggctgagagaaaccggcatagattgtataatgctttccccctgcaatatgacgtccttcttcatccacaacagtaaatgcttccccaggaatatgtacctgaagggtttttctttcttccttgtaaagttttactctgcagaacccgcataactgcgggtttggaaccgcataaatcgaattttcacacttgatatagatctgcaatacctcacaaatatctctttcgcccgtattttccaccttcacaaaaacatttgctcctgtttctgtttccaccacttctactgagcggacttccgcctttccataagttagtccgtacccgaaaggatactgagcctttcctttcatataccggtatgttcttccactcatggaataatcttcaaacgaaggcagttcgctcaaagtttcataaaaagtaacaggcagttttcctgaaggagattcttttccgaacaggatttccgcaacagcatttcctccacgggcacctggataccagagttgaagaattccctcaaaatgtttctgtgcaaaactcaagtctatgtcactccctgccatcatacataaaatcaccggttttccagtctgcgccaccacttccatcaatctacgctggcacaacgggagttgaagatcttccttatcaccagacgcatagctatttcctgtatctccttcttcaccttccagagtctcatccagaccaagacacaggataatcacgtcactattttgtgctacagttacagcttctgataagcgatccatatcctgggcaagaggttctgttttatttttgaaaagatcgcatccctgtgagtaaataatccttatctcatcacccacatatcttctgactccttccaatacagttacatattctgatgatgttccgtgataatttccgatcagagctgccctgctgtctgcattaggtccaataatgcctaatgtttttatctccttctctttcaacggaagaattccattctcgtttttcaaaagcacaatgctttctaacgctgccttgtgtgctatcaaaagatgttcgctacattccactttagaatatggtattttgtcatactcacttccatcaaaaagtcccagcataaaacgggttgtaaaaagacgaactgcagcctccgtaatagcttcctctgtaaccatgccatgatgataagcattaaggatatgaagatatgtatttccacagttcaaatcacaccctgcattcaatgccattgctgcagactgcattggcgtacccgtaaccatatggttttcatgaaaatcccttattgcccagcaatcagaaacaaaatgcccttcaaaattccactcaccccgaagtttattttttataagtgtcttactgccacaacaaggttcaccattgacacaattataggctcccataacagcttccacatgcgcatcctctacaagagctttgaaagctggaagatatgtctcttccatatccttttgagatacttcggcattaaactcatgacgtaatgcctctggaccggaatgaactgcaaaatgtttcgcgcaggcagccgctttcatcgtctcaccatttccctgaagcccttccacataggctttgcctaaagtagccgtaaggcaaggatcctctccatatgtctcgtgtcctctgccccagcgggggtcgcgaaagatatttacatttggagcccaaaaagtaagtcctttatagatatctctatcatcttgtttagaagccgcattatattttgccctgccttcttctgcaataatatctcctatttttcgaaccatatcttcatcaaatgaggcagccattccaattgcctgcggaaaaactgttgcaattcccgctctcgcaactccatgtaacccttcattccaccaattgtattctggaatcccaagccttgaaatacctggtgaatcatatctgagctgagaagccttctcctctatagtcattttcataaccagttcctgtgcttttctcctggcttcttttctgtccatcctttaacctccgcctatatattattcttttacgccacctaaagtaagtccggtaacaaaatatcgctgtaagaacgggtaaatacaaatgattggaagcatagtcagtattgacgccgctgctcgaactgtctcaggagtaaccgaacccgttgcatttttcattgcctctgccgaagccccttgattcgtcacagacgacagtaatttcatcagctcatactgcaatgttgttaattttgcattcattctgttgtacaacattgcatcaaaccatgaattccactgtcccactgctacaaaaagagcaactgtcgcataaacaggtttgcacagaggagaaatgattttcgtaaaaatagtgaagtatcctgctccatcaagctgcgctgactcctccagactgtctggaagtccattcatatatgtacgtataacaagcatattaaatgcactaatcattcccggaatcacatatacccagaaactgtttgttaacccaagtcctttgtacagcaaaaatgttggaatcataccaccatttacatacatcgtaataacccagaaaagagacagctgttttttaaataaaaatctttttctgcttacaataaatgccagtatcgcattagtaataagggctgtaaacgttccgatcagtgttcgtgccacagtaatataggcacctgtgatcagattgtctttctgtaaaacagtaataaagtttttcaatgtccattttctcggtatcagatatataccgcctcgcaatgcatccgttccttcattaaatgcaagagcaagcgtattcagaatcggatacaatgtgataataataaacagaatcataaaaattgtattgcatactgtaaacactttatctgcgggcgatgattttattttttttcttgtttccatcttgagccctccttagaataatctttcgtctccattgcgttttgcaagctgatttgcaataacaattagaataatacttaccacactcttaaatatacctgctgctgtaccaatggaaaaatctccctgactgataccccaattcagcacgtaaatgtcaattgtctgggatacactctgaacaagcccgtttcctaacagatactgaatttcgaaccctgcattcaacacatttccaacattcataagaagcagaatcataatagtaggtcttattcccggaagtgttacatgtttaatcttcgcccactttcctgctccgtcaattgatgccgcttcgtaaagtgacggatcaatagatgttattgccgccagatatataattgcattccatccggtttctttccatacgttggcaaaagcgacaataggccagaaatactctttatgagcaaaaaaattaatcggctgattaataacattcaaattaacaagcaattcattaataatgccagttcctgacaaagcatcatgaatgatgccggttacaataatccatgacaggaaatgcggcaggtacgatattgtctgtactgtttttttcccaattgtatttcgtacctcattgagaaggattgcaaatgcaattgcagcaacgaaagtaaccaccaaattgatcacacccattgcaagtgtatttcgtattacccgtaaaaaagttgcatctgaaaacaactgctgaaacttttgcaatccgacaaactcagagtgcaaaagtccgtcaatcggtctgtagttctgaaaagccatcacccagccgcccaatgggagatagtagaaaatgataccataaattacaataattccagaccagattagaagggatttctgtcgttttgcctccttccaactaaaatgaattttgggttcatccactactgttttttttctctttattcctaaagacataaattcacctcatttttcaaacaggcagataagcatgacacatatctgcccgttttgtatgttatatcctattcgaatttagctgcttctttcattctacgatccaattccgcctgcatctcatcaaggaaatcctgtggattgcatccctcataggctttcatatatgtattccattcactctcaaaatcatttgccatgacagttctcggaagatattcatgttttatctctcccatttttgtccatgccacaccacccggtgtacttgtagtcatcgtaccggaaaatgaatacatcggataccatggaccaggagtctcattcgttcccagcatatccacatatgtctcagcgccatatgccttaaaacatctctgtacggccgagttcagactgtcaaaaaattcatccggttgatcatcaggccaatttgcattgataccatcatcactcgttcctttatagtttgggaaataagaatatgaacaaaggtgtgatgctttgtatgccgtatctgctgcctgctttctctgttcttctgtccgataaaacaatccatcatcattaacttcataatcgacaccctctactccccagaatctcagattatgaatatcctgactaagcaaatcgtctataaactgcagtgctccttccacatctttgcagcttgttgtaattgcaagtcctgatcctgaattcataactcctcctgaacagtgccactgatttttaattccttcatcgatagtgatcggaagcggcacataactgcatcctttctcatcaagtccctgttgtttcaaggaatcatttacattatatgcaaagtcccaccactgatcgaccattcccagcacacgtcctgtagaaagtttagcaatatattcatcataagtctgtgtaaatgattcaggatccacataacctttcttgtattcttcattcaatttctgaaagtaccgttttgcagtatctgtagtattataatcaataaccttcagttcatctggatcaacaatcacagatccgtcatttggataaccatccagaaactgcggtgcattttccaggcaataatatctccagtcttcacatagaattgtgtaagcaatattctctgttccgtcttccattgtaggattggcttccatatagctttccaaaagatcaaaatattcatccaaagtatttacttcaggatatcctgcccactccagtactcttgtctgaatccaaaaggcttcatcattatgcgtcgtagccttctcttctcccttaacattctgaaactgctgaatccagtaaatatgaccatcatcccgtctcagcttattccactcttcatccgtataatacgccttgatattcggataatcatccagataatcatccaaaggaacaagtgctcctgcctcatagagctgtcccattgcatctccgccatcaataaaatctggataatcacctccggcaatcagcgttcctactgcctcagaagctgtctgaccggtaagccatgtctcgtccacctttacaccagttttttctgcgataatctgctgaatctcattgtcgtcattgatttcagctcctggaaccgcatagaaagctgtaaattcttttgttcctccctcattctcgctgcttccgctaccacatccggtaaacaatgataccgcaagtgcagatgccagcagcattcccgtcactctttttgctttcataattgtcctccttaaatttgataactttattttaacggatcagtacctgaaaaaaatcagataaagtatatcaaaaagcaggataaactatagaacttcactctgataaatcttctgcccctttcttttcatcctttgtcttcgcctgttttcggaattttgccggtgtacaacctttcactgagataaatcgattcacaaaatagtccaaatcccggtatcccaccgtctccgctatctggtatattttcttatctgtcctcagcaacagatggcaagcctgttctatccggcaattatttagatagtctttaaacgactgtccgaattttttcctaaatagctgtcccaaatacgctccattcaggtaatatttctcaccgaattctttaagtgtcagattctccgcatatctctcccgaatctctttttctactttccccaatatacctcgtgaggaatccttacgcatttgagccaaataatccccgtattcacgtgcgaccctacacagatgagctttacttccccgcagaatcccagcctcaaaagtcccttcactgatcatcctcaatatctcttcctgatttacactgtcatccagctccgatgcaagatgcagcagctgaaaaagaagataattaatattaagacgcattacctcgccggctatccctcgctctctcatttcctcataaaatccgtcaactgctttcataatttctgcatgattgttctgttcaatggcattcaggagaatatcaagatttttcttacaaagcatgatcccgtttgtatgaatttgcatttcctcctcataataataaatttcctttttttccctgaatccctgaaaggatcttaccctcctcgctgtactgtatgattttgcaattttttccagatttttttcctcttttcccacaatcataatcactggcagtccgagtatttctctcagatactttataaaatctcccaaatattctttaatatctgaagattcatacatatatctgcataaaatgaaaccaacatcatagaccttttcctgtatggagacatccatcacacaatgctgactgtcatcctgaagataatccttacagatattatacagctgtttttgatttgctaactttacggaatcctcatagtcgtcctcgtaatttttttcatcgatcaggatttcaacatacctcacctgttctgataaacgaatatgctgttgaacatactcaatcgtcagaggatccgatcttccctgaataatagagataagtttcccggaaagatacgcattttccagtttttttgtttctctttctttctccaattctatattttttaatcctctgactttgcgaagtgcctgtacaagtttttcttcctccacgggtttcaatatatagtcattgcatgcatatttgattgcctcctgagcatactgaaaatcagcatatccgctcagaataataaaataaatatctctatatttttcagagattcgcagcttacgaagcaactcaagaccatccataattggcattttaatatcagaaagaataagatctgcatcgtgattctgcagaaaaagaagtgcctcttctccgtcagctgctgagcctacaatctcaaatccttcatcttcccaatctataagctctttcattccccgaagtataaatggttcatcatctactaatagtactctcagcatcttatcaccctttttcactttctataaatggcaggcgtatcagaaccgacacccccgttccctcttccccgtttaattcaaattgcactttatcatgtgacatcattttcagtctcaggcaggcattaataatacctacgcctttttcattttccagtagttctatgctcgcatttttcatctttcgccgcatactgtcaaactctttttccgtcattccttccccggtatcttctacttcaatacacatttcctcattttctctgtacacagtaataaatatccagcctggtgcagtctttttctctattccatgcacacatgcattttcagcaaatgtaacaattgtcagtttcggtatcttctgatgctggcattctgtttccacatccagcctatatgacagtcttttaccaaatcggtactgctgaagatccatgtaattcttgacaatctccatctccttacctacctcaataagatcctctccccaatccacatactgtctctgcataacagcaagtttttcaaccatttccgccgtgattttttcttttcttattacactgtgcatccgtatactttcaagtgcattaaaaaggaaatgaggattgatctgacttctcagtgcaagaagctcagccttttgtcttgccactgtcatttcctgttccagtatccgatttttataaacaatatttactaacgttgttatacgtgatgccatccgattgtaattcctcatcagatcacctatttcatcttttgcactcacattttcaatctcaaccagattttcatcttctgtgtttctgaaaatactgctcaatctgctgattctggcagttaatgaatggtttaaaagcagtaccataatcagcgggaaaaagatgttgattaaaaaaaggagcaacagcataggcagcctttccaccagctttcctataagatctgtctctggacgtagcacgtatatttccagttgagcaccgtaaatattacttgttttcttatattcaacttctttgtaatctgaaaatttttcatactcatctccgatattttcgccatcacgatttgaaaatataatttttccctcatggcatatatatacgggcgtatcataattcagattttgcagatttttatttatcgtactgtaatccatttcaattttaagcaacttttccgactgtccgcctccatagtagttcatcttacgaacaaagtagacatgcctttccggatgcattactgctcctggtacctttggttcatatgcaaaataaagcatctgttctgttcctttttcattcagatcccgataccaaccgctttctttgatcagatccagatttctgaccgtacctccgcttacaattgtactgttatctgtatacaaggttgtcagtgaacttcctgtcatatctgaactttggaaaagtgtatctttaaaaaattcctgataacttactacataatcaaaaggatctctatattccatttctaggaaatcattgatatacttattcgcatatatactttttgctacttttgaaacagtgtccacatcataaaaaatctgatagttaacagcatctgcaatatcttccatttcagatctgcgcagctgtgcttctgtatgcagaaccgtatatatgatcaccccgtctgtcagcgtgattggtaaaagcatacagaatatgtagataaaaatcatttttttgcggattgaaaaattatctatctgtctcacaaatttttccagtataaattgcatccctgccccactcctttataaatggtatgaccggaagtcccctttttccatacagacatatattcataggacaatccttccatgcataacgaattcccgttggttcctcgccatcagacaaccatgcacaaatttcatttccatcaactgtgacatatgctcttttataatctccgttcgcttttctgagttcaacttcacttactaattcacatccgtcttttttacttccagtttgcaacggctgatcaaaaacagcatatactcttttatctctgtccaatctgattttcctcacctgcggtcctgtacattcttccttttctccataaaccaatttatgtacagcaagcgcagctcgcattcccaaagccttcttatccatgggatggagatcattatactcgcccacatcatatgcctgtaccatcgccgtattttcaatctccattgcctgccgctgtacttccctgaattccgcccattgcgtcccctgtttcttaatatttccatcggaaaaaccagcaagctgtacgtatataatcggcaattgcttttccttccaagattttctccagtcattgaccagcgcacgaaattctaacgcatatctattcggatgtccaacatcagattctccttgataataaataacagcacatatcttataaggacttaccggtgatatcataccattaaacatagctgatgccatataattgaaaaatgtcttttccggcaaatattccatttgttttctaatctgtgcatcccatgttccagacaaatcaagccatctttctttcccctttttgaatcgtattccatattgttttcctggcattgctcctcctctgccacggaatacatacagatgtatgcagaccacattttctcctgcccttagaattcctggggctacaggataaatccttgatgcatatctgtcataagaactaccgcagcagattccatttatatatattttatcagcgtctgtaaacgctcccataagaatttctgcaggcgtaaccacctgttcttctgtaataaagaacttcttttccagtaaaactgttccacagaaatctctcatgtttcctttccatatacctggaatacttattttataaaaactatcagtcctttgatcaaaagactgatccgcttttttcatccagtatttttctctttcaatttctattttctgcgtacataaaacatagtcttcatttttacatttttccaactcatctgtataaaaacccatatgccttattgtctcttcactacaccatgctttcaccggtgttccctccacagcagtctggatcagcccgaccgggacatcatttttttctcgaagagacaatgccataaacagtcctaaagcgctgaattcaaggaccgattccccctgtgcgctttcccagcgcccttgtgaaagccattgtcttttctctccgaaatcatattctttcggaacatcaaactttctgataaacgaatcatttattttctctatttcatctgcaaaccgctctgttacaaattttattcgcaattccatattggactgaccgcccagaagaaatacatccccactcataatgtttctaattacacgcttctcgtcaccgtttatttccatacaatacggaccaccaaccggaagatccggaagttctgccacaaacattccatgtgtatctgccttagtattaaacttcttgccgtcgagtattcccgctactataatttcagggcttgtctctccccaaatataattcttttttccccgttgcaataccattccatcactgaacaaatatgataacttcaatccttttctcctctagcgatattttatcatgcgtctataattccccaaaaagctggtttttcgttacaggcatcatcaaatggcaacggcatctgaggtctgttgccatcagatccacctcctaccaaagcagctacctgtagccacgaaactgcgtcatgggtgccccagaatgtaacacctgtaatattaattttatcttccttatcaagactataaattgttcgaaacaactctttataccttgctccctctctctctaactccaactcgcggtctgatccgtcataacttttgcttgactgcatatcaaattccgtaaactgaatttcatttacaatagatgaatacatatacacagcttctctaatctgttcaatagacggaaactccatatgatagtgtgcctgcattcccatcccatcaatacgtgctccctttgtatccttaatctgcctgagcaaaacacaaatagcatcccgtttcaccggatctgcatcattgtaatcattataaaataacttgatatcattaggcgcatagcggtttgcaaaaacaaatgactgagtaatgtagctaatatccccctgaaaaatattataccaacccgtattcttgttattacatgtatagcgcactgatcctgggtttttctctggatgaaaatcgtccggctcaatctgttcatttactacatcccaggcatatataataccacgatacgggctatttactccgtcataatgctctagcactttctgaatataattttcaaggcgcttcagcatcttttctttacccacatatgccccctgagagtcatatttttcacgaaaaaaccaatccggagtctgtgaatgccatacgagtacatgaccccttacccgtattgtatcatctggatttttctcattatgtttttttataaaatccataattttatctgccttgctgaaatcaagtgttaaaaccggatcgccattttcatctaaacatatatttccttcagtatcaacacggaatacaggaacgtctcccaaaattatttctggtttcatctcgttttcacatgtaatactattatagtgctttattacaatattcctaatcttctcctcatttagcatgcctgacataattgcaacgccagccttcccattaattgctgatttctgttccagacgtttttttatcgacattatatccttcatattatccctcctgctttttacatataagtctaaataatttaaattatataataaaagtaaaaaagtaaaatatgaataattgcagaaaatcccccggcaaattaaataacctcgcagtattatttctcaagcctgcaaaatcttaggagaaaaacaatgcttaaatcaaaaaatacaacaccatacttactgtcgataattttttgtctttgtgtctatttaattgtcaacttatttttattttaagttaacatttgtttattattacacttccttataatacaaacaaatattctgatatgtcccatctttcatacgaaatccattcggtacagttccaatctgcacaaatcctaatctctcgtacaaatgacgtgcgtgaacattattttctaccactgcattgaactgtaaaaccttaaagtcatgcagctttgcctgtacaaggcagtcacttacgagtttctcaccgatatgctttccacggcaagttgaatccactgcataacttgcatttgcaaggtggccgcagcggccgatattattgggatgcaggatgtaaagccctacaatttgcccatctttatctgcaacaccgcaataggtctgtgatgcaaagaattctgcccctgtcttatcatccaggaactcttcctgtggaaatgcttcaccatcttctactacttcattccagatgtgaaccatctcggaaatatctttttctgtatattttctaattatcataatgtcattctcctcttctagtctaactttattgtactgttgaatttttacttttccgatattctgttggagtcattttataactctttttaaatgctctacaaaaataatctacattatgaaaccctgtttcgtaagaaatcgtattgatttttttctctgtatttttaatcaacaatgctgccttcttcagccgataaccaatcaaataattaatcggagtgatatgtaaaaatctattaaaaagattcaacaccgtacttttactaatattagcataacaggcaatttcctccaaagaaatatcttctgcataattctggtgcaaaaactgcatcataagctgcaagcgtgcctgagctgttccggaatcgtccgtttgctcttccatacatgttttgtcaatattttcataaataatcagccataatttctgcataagaactgatgtaagcaactcaccatcaccttctctatcccgtgcagaaaatatttgcttcataatttctaatgcctctccttgccataaattctccccgtttaagatcaagtatgacaacgatgatgaaacaatcggttgaatatatttttgatagatcaaactattttccggcgcaagaaaggacggcatacaaaggaaattggggatgacagtttcatcactggaataaaatttgtgcaaaatctttgaatttataaaaataccatttccctttgatagtgaaaacatcgattcaccaacacataccgtcatgtttccggattcaacatatacaaattcccattctgtatgccaatgccagtcaatgcaatgaaaatcaaattgtgataacttttcaaaatagcatttaaacggataaccgtccgtcccatgttttgctgattccattaaattctcatctgttacaattttattttgtgccatatctttcctcacaacaacctttttattggatttacgatataatacaatatttatgcgatataagtcaatgttttttcttgttatctaatatataatacggtataaaaagaacaaaggagttttctgttatgccagattatcaaaaaacaaaagtggcatgttatctgggactcgtcactcaggcgatatccgcaaatttcgcaccactattatttttaaaatttcacaatgattatgatatttcattgggtaacattgctttaatatctacattctttttcttcacacagcttttagtcgacttattttgtgcgaagtttgtagatcgaatcggttatcgtgtatgtatcgtaacttctgaaatatgtgctgctgccggattagttggacttgcatttcttcctgatctgttaccgaatccttttaccggaattattataagtgtaatcatctatgctgtggggagtggattgatcgaagttctctgcagtcctatcatcgaagcatgcccgtttaaaaataaagaagcaactatgagcctgcttcactccttttactgttggggtgcggcagccaccatactgatttcgagcttatttttcttcctgttcgggatgaatagttggaaatggctggcagtcatgtgggcacttattccggcgattaatatatataatttcgcaacttgtccgatagaacatttagtaaatgacagaaatggaatgggcgtcagacagttattccgaactcctgttgtctggctggcaatctgcctgatgatttgttcaggagcatctgaattggctatggcacaatgggcatcagcctatgccgaagctgcactgggactttctaaaacttttggggatttgattgggccttgcatgtttgcaattacaatgggaataagtcgcttgatttttggaaaatatggtgaaaaaatggatttgatgaagtttatgacaggttccggaatcctctgtgtgatctgttatcttttaaccaccttatcatcgaatccggtaatcgggttaaccggttgtattgtatgtggtttttcggttggaatcatgtggcctggaacgatcagtattacatctaaaaaaatgccggccggtggaaccgcaatgtttgcattgctcgccatggccggcgatttgggaggcagcattggacctggtattgtaggttatgttacccagaattctgataataatatccgtgttggaatggggataggtcttatctttccacttgttctcttgatcatgttattcattctttgcaaggggaagaagacgcaggaatcgcttcatatagtttaatttcagttgaagttgaatttcttatcctaacctcaattgattctttctctacagaatttatactctctagatggaacgcatcaccttgcactcgtatggtctcaacgttccatctacttttccatcagagtaaatggttccatttgcaataaccggcagttcttttcttaactgaatcaattttttatagaaattcaggatagtatctagcctctttctgtattttctttcacgcttcgcgctcttcatcagacttgaagttatcttactttgctttgaactctatccactcattatctataaggacaactacactgtcatcctcaataactgcataaggtgttcctaaatctctgttgaaattggcttcgccatctttttgaggtatgccgttttctgcataagaagtagtatattgaataacactctcgtccacttcaacaggaacagcatgatcagtggaatagtagttagtaccatttaccattatagttgcagggtagtcaccactatctgattttccacaccttgccaaagtaagaatacaaactaatgtcaaaactgatgcaattaactttttcatacaatcacctcgctattcacttttactatttccgcaataatattgccaataaaacaattagaactaatataattatcaaaaaaataaaccttatttgaccgtaaaatcctaatccaatccactgcaatactattattaacacaaaaactaataacgcccagtaatttcttttcatgcaaatccctcccttaatgtcgtaacggcttgccttggaaatcaaaaacgcatcttgggatctcttaattcctcgtctgagcacatctttctcctctatatcaagtgcatctgcaagcatccttgactgaatatcaactgttttcttaagcgcctgaagacgcttttcattgattgcatagccttgcaaaataaactgtttaaggacattatttgcccattttctgaaagctatacctcttttagaattaactcgatatccgacagacaaaatcatattcaaattataaatttggggttttcgtccccctgtacttctgtcggaaaaaccgacagaagtctcatccagttctcctgaagcaagaatatttgaaatatgttcgcttactgtagcgtgcttaacatcaaacaacacttccagtttgcacatccaatcattttcttcattctatcacagcatcttattattccgccatcaatttttcaaaccaggtacccttgacaataataaactggtctgcgcctttccattcttgcagcattttatccatcccgagcaaactcggactttggcccgtcacaataaacaacccagcagcaataaccgtggtatattcttcacccttaactccatgaagagtcgaaattaccacagcatttttatctccaaattacttactgattgattcaaaatctgtggcaagcgaatatctcttcactcttgagcagatttcatcaaaaaagaagcttttaactctgacaatgatgattctttacttacgcatatgtttaataacgcaaaaactttttgtattgcaatacttaaacagattattccatccgcatctatatgacgacaacaattaaccgcagaaagaacatcataactttgaatattatctgacaccataattctaaaatcatctctaataattgagataaattcagttgcaattcgttttcttagtctaatattttttccagcaggcataaatagcaactttgctatcagaaataaaggattcatcggatcatattttatcggggaaatatctggtgcgtcaaacggaacatcaggaagccagctttacacttctggaggcaacctatctggaacgaaccggtctccgctttgagccatccgattatgtttcctttggtttggctgacaaaaatggattcttgaccaatgccgggaagctcatgaccgatcagcacacggtttataactcccgtatgttttgtaccaggtggaacggcttagaaaaaggttctatctttgatgatgctctggatgataaggaatacgaggggaatctgatttatctgctgaaaagcggcagtgaatttattcgcaataattctaaagtgcgatttattaaagaagctcagtatcgggtagacaaacctgattatgctgaacgagctgtgacagaggctcttgtcgatgcgctcatccatcgtgattacattgtgcttggcagtgaagtccacattgatatgtttgatgatcgggtggaaatcacatctccgggcggtatgtttggcggcggctcaattcaggaatacgatatttacagtatccgttccatgcgatgaaaccctgtgattgctgacctgttccaccgcatgaagtacatggaacgccgtggaagtggcctacgcaaaatcgtcagtgaaaccgaaaagctgcctggatgcacagaggcatatgagcccgaattttcctcaacagcgacagatttcagagttattttgaaaaatgtgaattacaacttagagggtaactcccaccaagttacccaccaagttacccaccaagtcaacaaactaacaatggtctctgagcagattttggctttctgtacaaaaccaaaatcaaagaaagaagttgcagcattttgtggtttcaaagatctaagaaatttcaccttgaagtatatcgatccgcttttagaagcagggaaattagaaatgacgattcccgataaacctaaaagtcgtaatcaaaaatatattaccgttcattttgaatgaacaaaaagctggagcatgacctaaacaaagaaaagggggttgttgtgaaaatgattactctattttgcaacagccccttcatacctaccacatcattcatacaacagttgtcacagagcaaggtcacgtcaaccgcttcatctgtaaagaacatacgggagacctctgccgtatatttagacacgttatatcccttcggcttcttaacagccttctcagtcagcagctccagctgtttcttgatttggtctactctatatgtacgaacaaactctctctcatcacagtaaccggtcagatagtaatagtcgccatcccagatcagatcaaatggactgactgtatatagtttcacatcgttcctgagcacttccttcttcttaccattaagttcagaataatagaaggaaatcttcacgccgacattgatggcctcattgattgcatccacgatgtaatagcccttttcattctctgacttcacacggctgatgatatgcacagatctctttaacttatctataaccgatgtcagaactctaaactatccgaacatatactcttctatcaacttatgtctattgcattttggcgtttaatccataatacatacgtttgatatattactagacaatgtattgctatctcaagtacaagtctaaccgtgctattcatagacagatactgatttgcatgaactataagattataatttgaataaatgatgcggaacattccccaaatcgtaaccaaataaatcattatagaatatttcttacttttcttacccgaaacaaaataagcgaatgttgctacagcaccaactatattcgggataattaaaacaatccaccataaaacaatctgaacatttgaattaattaccatatttccagttccagtaatacaggtcgcagcaaaaaatgcaacaattacggcacccatcctttttggtgatagcattcctcgtatagcattaacaaaaccatacgcaaagaaaaaaatctgaataagcaatgccaatacatttattacaatcgcttgaatatcattataatcaatcatctctgattgcaacgggaatctaattataatgtccacaatagtgataaaaaatgaaattaccacaaacgcataaagagctatcattatgttattgacgcttttcttttcaataacagggttacgttctactactttttccatttcttttccagataacaggtcgtcaagactcacttccagaatctgcgatatttttttagtagtaagtaaatcagggtaacgatccccacattcccaccttgataccgcctgtctagttacatataattgctcggcaagagactgttgggtcattcccttttcttctctcgctcttcttagttgttcgccaaattcgaccatattaaatctactcctttcataatcagttcatctgcagatgtaaccttagtatcacaaattactagaacaacttcaagcaacatctcaataacgcatgtcaccattatggtgcggccgctaaaatcaagcatttatcccatttacaaatctatcgttaagtaaatcgggagttgtcggcttccccaaaagattctttctagcatgcatcttctttcgcccttgataagaactatcttaacttcacaacatccatccaagcaacattcccattaccactgttcctaccgaaatgatttgccaaaacttcagttcccttttcatacaggcaactttgatattcgtctttttattaattctgttgatttcttctctacaattttgctttgccataaacgtcttctgttgtcctgattgtgaatatcttcttcatacagaagatgggaatagatttctttgttgcaaaccgaataagtttcaccacatttctagacatttcatcaagatttaagggtaaagaaaaaccccagaaccgaagttctgaggtttgtaatctctttgaattgtaattctcttgcgagataattatctctttgagaactgtggtgctctacgagctgctttgagacctggtttcttacgctctttcatacgtgggtcacgagtcaggtaacctgctgacttgagaaccggtctgtaatctgcgtctgcctcaaggagtgctctagcgattccgtgacggatggctccagcctgtcctgtgtatccaccaccacatacattaacgattacatcgaacttgtcagctgtctctgtagccacgagcggctggcgaacaacaactttcagagtttcaagtccaagatactcgtcgatatctcttttattgattgtgatctttcctgttccaggtacaagatatactcttgcgatagatttttttcttcttcctgttccgtaatattttgcgttagccactgttatttcctccttctacctaaaatgtaagaacttccggcttctgagcctgatttgcatgctctggtccagcgtatacatgaagcttcttgatcatgtctcttcccataggtcctttcggaagcattcccttaacagcaagctcgatcaccttctctggcttcttagcaagaagctcagcaagtgtagtctctttcattcctccaacatagtcagagtgattgtagtagatcttctgctgtaatttctttcctgttactttaactttctctgcattaacaacgattacataatctcctgtatcgatgtgcggagtatattccggtttgttctttcctctgagtacctttgcgatctcagatgcaagacgtccaagtgtagcgccttcagcgtcaaccacataccattttctttcaatcttatcagggttagccatataagttttcatgggtgttcctcctataaataatcattatatactattgcttatttatttgaaatcagcatactccggggctttggtgcatactgtttctccttatgtcataccttgctattatatgttgatttatgttctgtgtcaagtgttttttgacgaaatcgcaatatttttttacacagaaatgcctgtcctcgactatctccagaacagccatcactcatttattcaaaatgtactgttaccaccatgatctcactgtccgtgcccacacggatattcggtccatagacacctactcctgaagtaacaatgctgtacatatcacctatctttttaactccccagtagtttttccacgcaaagggctgaacaatcgtcagtggaaagaattgtcctgcatgagtgtgccctgagaataagacatccacacttgctttatcatactctctcaattcatccggctcatgattcattacaaacagtggctttgtctgatctaaatctgctgtcagttcttcgatggactttcgttttgaagtgcctcgcccattcttttctccgtccaaccttccaacaagataaaacttctgatcaatcagttctgattcatcctccagcactgtgattccggctttttccatgaattcatccattctcggatcgcggagtgctttcttagacgcgccgattgagaatcccgcaaccaatgtctctttcacatcatgattcccatacactgcatatgttccgtacttactttgaatctgatgtaatgtctctgacaagtgttttggatcatctaatgcctcatattcattatcaaaaatgtctccagccaggacaaccaggtccggatcctgcttgttaatcctatcaaccattttctgcatgtctttgctgccgacactatatcctaaatgcagatctgcgatcaatacaaccttcatttccttcaaatcatctacctgcttattgatcgtaatatcatgaaatgatgtcttgattttcttcgcatgcactgctccgtataacgtagacagaaaactccctcccagaaccaaaactgccagtagaattacacctgttttggttcggatcagtggtccgcccatccaggaccatttgaaagcgagaagagaacgtaacagccaaattaaatcacaaaccaggataaaggaaataacataaatcagaaatccaatccaatagtttccaaattgaagaattttaagctgtatttcactctgtggaagaaattcccccagaaatattgaagaggcaagtaatagaagtaagaaggcaattcctatacttactattttccaatgcggaatctccatccactttctccagcgaaaccatcccgtaaaaacataggaacacagtacaatataaacaaataacataaaccatttaaacattccgttgccttgcgtccttccgcttattttcttactaaatctacttctgctttcattcatttctctacaaaatgttctatctccgcacgaaatttctctttctcctcatcgtcgctcaggctttcaatcagttctgctacaacttccgggatctccggtctgaatttcatataccagtcaagcgtctcgcggatgtatttcttgcgaaacttctcatttgcacagaatgcgctctgcagattatgaagacgatctgcccctttcactgcatatgccatagaatttgtcttaatccctgcaatataggtctccatacaatattctttttccttcgtcaccagcttcactgcttttaagacatcttctcccccgatttctacaatctcctgttctgaagcatctgtatcctctaaaagatcatgaaatactgccgcaactcgatattcaacctgcttaccatcctgtcgaagaatctctgcaactgcaatcggatgtacaataaaaggagctccacctatccgaaactgtccttcatgcttcttcttcgcatactccagtgctttctggtatatctcttctcccatgatatcctcctttgaatcttccatatttctgtatcatccggccagtatcttcctgttatttcgataattttagtatacgttgtatttctcgtaaatgcaattctatctctttaaactttttcaccaaaacgctcaacttatgttataattagaaataggttttaagagatttttatatctctgactctttatcgaaatccgataaaaatccgaatcaagaaagtgggtaacaactatgtgggcttacaatgaaactttttatcaaatctacccgatcggattctgcggtgctccggtacataatgacggagtaacagaacaccggattcttaaaattggtgaatgggcagaatatcttggtgatcttggaatcggttcaatcatcttgaatccgattttcgaatcagacaaccatgggtatgacacaagagatttccgcaagatcgactgtcgtcttggaacgaacgaagactttaaagaagtctgtgaaaagctgcatgataacaatgtaaagatcatgctggacggagtattcaatcatgttggacgtggcttctgggcattcaaggatgtgcaggagaagaaatgggactctccgtataaagactggttccatatcagcttcgacggaaacagtgcgtataacgatggtttctggtatgaaggatgggaaggtcattttgaacttgttaaattaaatctgcagaatcctgcagttgtcgactatctgcttgactgtgtcaagatgtggattgaagagttcggcatagacggactgcgtctggatgtagcttattgcctggatcataatttcatgcgccgtctgcgcagcttctgcgaggaactgaaaccgggatttgcactgatcggtgaggttctcttcggcgactacaatctaattgtaaacgacgagatgcttcacagctgtacaaactacgagtgctacaaaggaattttttcaagcttcaactgcatgaatatgtttgagatcgcacattctctgaatcgccagttcggaccagagcagtggtgtatttatcgtggaaagcatttgatgacattcgtagataatcatgatgtcacacgtatcgcaagtattctgacgaacaagaatcatcttccgcttgcttacggtcttctctttggtatgccgggtattccgtgtatctattatggaagtgaatggggcgaggaaggtgtgaaagcaccggataatgactatgcacttcgtccatgcttcgaagagccgaagccgaatgaactgactgatttcatcaaagaattgattgaagttcgcagaaacagtgatgctctttgcaatggttcttaccgaaatgttgtcattacaaatcatcagctgatctttgaacgccgcactgataatgaacgtgttctcgttgcgatcaacgccggtgattctgagtttactgccggaaatggagaactgcagggtaatttcacagaactgcttgcaaatgctgatgaaatagaaaatgtaactctgaacggacagctgacaatgccggcttacagtgtacagttcctgaaagctgtataagattttactgattaagtcattagaaaaaggatgaatggtaatgtatctcacatttaccattcatccttttctttttataacttcttcacaaaaagtgtacgcatcgcattgagtattgcaagtaccataactcccacatctgcaaagattgcgagccacatatttgcaattccaagtgctccgagaatcaggcacacgccctttactgcgagagcaaatacaatattctgatatacgattccgagacatttcttagaaattcggattgccttaacaatcttcaacggatcatcatccatcaggacaacatctgctgcctcaattgccgcatcagatcccatcgcccccatcgcaataccgatatccgctcttccgagaaccggtgcatcgttgataccgtctccgacaaatgccagatttgccttcgccggcttctcagccagaagtctttctacctgctccaccttatctccaggaagcagttcgctgtgaacctcatcaataccaagatctgctgccacctggtctgccacctgtttcgcatctcccgtcaacatgattgtcttctgaattcctgcctgtttcagtttcgcaattgcttctttagaagtcggtttctcaacatctgaaatcacaatgtgtcctgcatattcgccatcaattgccatatgtatgattgttcctactttatgacatgatttatatggaataccaaggcgatccatcagcttaacatttcctgctgcaacacttctaccatctaccttcgctgtaattccatttccactaatctcttcaatctcgctaacgcgcgaacgatccagttcttttccgtaagccctctgaatactcttgctgattggatgggacgaagcactctctgcaagtgccgcatactctaagagctgcttttcttccatctgattatgatgtactccgaccacttcaaaaattccctgtgtcaaagttcctgtcttatcaaaaacaacatattttgtcttggacagtgcctcaagataattggatcctttcaccagaatcccctcatggcttgccccgccgattcctgcgaaaaagctaagtgggatgctgataaccagcgcgcacggacagctgattacaagaaatgtcaatgctctgtagatccagtcattccactgcggtgcagctcccattgcaaacattctcacaagtggtggaagcactgcaagtgcaagtgcaccatagcataccgccggtgtataatattttgcaaatttagaaataaagttctctgatcttgattttctggatgtagattcttctaccagttccagtaccttggataccgttgattctccgaactcttttgttgtacggatcttcaacacccctgtcatattgatacatgcgctgatgatctcatcacctgtctttgcttctcttggaacgctttcaccggtcagcgcacttgtattcagtgtagatgtaccttctacaactacaccgtcgatcggcactttttctcccggctgaacaataatcactgttccgatctcaacttcatccggatccacctgttcaagacttccatcttgctctatgtttgcataatccggacggatatccatcagttcactgatatttctgcggctctttccaactgcatagctctggaaaagttcaccgatctgataaaacagcataacagctaccgcttcattaaagtctccggacttctcataaaatgcaatcgcgatcgcaccgaccgtagcaactgccatcaggaaattctcatcaaatacctgacggtttaagattcccttccatgctttcttcaaaatatcgtaaccaacaatcagatatgggatcagaaacaatacaaatctgataattcctgttaccggaaggaaattcaatagaatcaggagcaccgccgcagcgatgatcctggtcagcatctttttctgcttcttcgtcattctcttcaccctcttacaggtagatctcgcaatcgtcctctaccttcttacaattcttcaggacgtctttcataacgctctttgcatcctgtccctcttcaaactcaacgatcatcttctgtgtcatgaaattcactgttgcattctgaacacctgctgtgttctttgctgcatcttccatcttgttcgcacagtttgcacaatccacttcgatcttatacgtcttcttcatctttcttctcctttaatcttctttgatctttgactctcatcaaatttcttacatcttctcttatttttcattaaacaattaagcagttgtttaatctttatatttacattatagctctccaaatgaaaaagtcaatacattttgccatttttgtgttacaatacctttatgattaaagagatactgaaggtattcttgaattgtaactgttcagagccaagcaaaatttcataaaacaggtgtaaaatgcttgcatttttaaaactgtttttgaaattttatttggcggatacgccacaccgacgaaatgcgtagcattttggaggttggctctgaacagttactataatatttttaaaggagattgtttatgactgaccatattttaccacataatcatggtgaacatttgaatacaaaacttcttatagataacattgcaaagacggaggacttccagattgtagctgacctgttcaaggtcctcggagataacagcagggtacgcattttctggcttctctgccactgcgaagaatgtgtgatcaatatttcttccatgatggacatgagtagcccggctgtctctcaccatctccgccagctgaaatcttacggactgattaccagccgcagagaagggaaagaagtttactacaaagcagcagacacaaaccaggctcagctgcttcatcacatgatcgagcaggtgattaaaatcacatgtcctgaagcttaactgttattactgcaatatcacgcaattaaacaagtatatcaaaacggaaagatatgaatttctcagagatattcacatctttccgttttcttactgaatttattcatattttgtaactgttcataagaaagttttacacttcaccatttttaaacttaatgatcatttcattcgtcaaactgtctctgctcggctccaccggaatctcatccctttgaaaccattctgccagtgccagttcttcccgatctaatgtaatttcttcctctccatccaggtcgcaatagaaccccatcaggatcgtatcactgaaagaccacggctggctcttataataacgtatgttcttgactttcagtccgacttcttccatgacttcacgctgaacagtctcctcgattgtttctccaatctcggtaaatcctgcaagaagtgcatattttttatatgctcttccagcgtattttgacataagaatcttgtcaccatcagttactcctatgataactgccgggcagatttttggaaattccatattgccacaatgatcgcaacgcatcatacgttctttttcatcatgtctcatcttatgtccacagcgtccacagaacttgcgattacgataccagttgttcaactgataaccggtaattccggcaaatgcaagatactgcggttctgcataacggaaagattctttattctccattgtaaactctgacaaccgttcacgactaatattctgtaccagataaaagcgttcctcgtcaatcgtaaacagataaactgcttcttcataaatttcttcattaagccgttccaaatcacgaaatcttggaaaatcaattccatctttccttttcttcagcagtgtactttgtccttcgtaatacaatgcatagctctgcgcatctggagggcatggtctgtactggttatcaaactgatgtggctgtatatcctgaatcataattcttttcctttcttaaacatagaaccaagaacccagagaactccacctgctccaattgcaaaatctcccaggttatatgttacttgatccaacttttcctttcctgtcttaactccgatgtaatcaacaaccttctctttatgataacggtccgtcaagttactccaggcacctgctgccgcaagtgtgattccggtttttcttaaaatattgctgttccctagaagtgtcagcatctgtatcactgtcacaatacctgttcccacttctgtaagctttttcactttctttggattattcgcaaatactcccagacagattcctggattatgaatacgtcgaagttccagcttctctgccagcttcctcttctctcccatcttcaagttcttttctacatagtgctttgcccattgatccacaaggaataccgtggttccacccaacggatagaatttatttttcttcacgctatcatctcccagtcatttcatattacaattcaaagtacctgttcccggcaacaatttctctacagcatttccagaaaatctttttctgaaataatcggaactccaagatctcttgcctttttattttttgaagatgtggaattcacgtcattgttgatcaaataatttgtctttgatgtgacacttcccgtcaccttaccgccacgtttttcaatctcagcctttacctctgcacgatttgcaaaatgttcaacacttccggtaataacaaagttcactccggcgaatttctggctgtcttctgttacttcctcttcttctaattccacttcgctaagaagtcgcttaaagatttcctgatgctcttgctctttaaaataatctacatagcttttcgccataacagctccaacaccctgaatctcgacaagttctgtctcttctgcgtgaagcacacgctgcggatcatttcccaatgcacgacagatcaccttcgcattcgcacttccgattcccggaattccgagaccataaaccagtcttgcaagtgttgtctttcttgccttttcaatactgctctgcagtttcaggaaagatttttcgccaaagccatccattgtcatgatctcatctctgtagttatcaagatggaagagatctgtaaagtctttcacataaccgtggaaaatgaatttctccagtgtcgcctctgaaaggccctcaatattcatcgcatctctgctcacaaaaagtgcaaaggacttcacatgctttgcctgacacttcggattggtacaatacagcgtctttgtctcattttccatagagattttcgtctcacctccacagaccggacaaacttttggaatatctttcactccgcttcttgtcaaattctccgcaatctgcggaataatcatgttcgccttgtatacctggatctcatctccaacaccaagttcaagttcttccatgatgctgatattatggacgcttgcacggctgactgtcgttccttcaagctctaccggctcaaaaaccgccaccggattgatcagacctgttcgtgacggactccactcaatctcaagcagctttgtgttgcggatctcatctgcccatttgaaggcaaaggaatctcttgggaacttcgctgttgttccaagtgactgtccgtaagcaatatcatcatacacaagcacaagaccgtccgatggaacttcgttgtgctcaatctcacgggcaaaccatgccacttcctcttcaatcgtatctcttgtcacttcatggttctccacaacatcaaatccctggttttcaagccactgcatctgatattttctggaattctggaagtccacgccttctgcacgaacgagtgtaaatgcatagaatcttacatttctctttgcagtgatttcattattcagctgacgaacagaaccgctgcaaagatttcgtggattcttatatttcgcatctacatcctcaatctcttcattgatcttctcgaaatctttataggaaataacggcctctcctcgcagtacaagttctccctgatatggaatcttaagcggtacatttttaaatactttcgcattgtttgtaatgacctcaccgatcactccgtttcctctggtgactgccttcacaatttctccgttctgataggtcagaacaacagtaagtccatccagtttccaggagattaatgctttttgtccgcctaggaattccttcagcctttctacatctttcgttttatccagagaaagcattggacgctcatgacgttctttcgggagctcactgagtacttcatatccaacatttacagtcggactgtttgccattctcgtaccaagcttctcttccaactcctgcagttcatcatagagcttgtcatactcgtagttgctcatgatctctgtattttcctgctcataagaacgtctcgctctgttcagaagttccaccagttctcgcatgtgattcatttctttctgctcatccatcatcgcttcttccctttcccatgtctcgttctattatcttgtgctgctgcccactgttcctggtattttcctcccggaagtacggaagaatctttcagctgatcatataattcattcaattcctgatctgtcagttttctgtactgtccatccttcagtccatccagtgtaatgttcatcacgcggacgcgtaaaagatccttcacttcatatccgagagcttcacacattctgcggatctggcggttcagcccttgagtcaggataatggaaaatgtatactttccaatctttttcacagtacacggacgggtcacagtatcaaggatcggaactccggctgccattttcctcaggaagtcttccgtaatctctttatcaacagttactttatattctttctcatgtttattggctgcacgcatcattttattgatgatatctccattattcgtcatcaacaaaagtccatgagaatccttatcaagtcgtccgatataagtcacacgcaccggataattcaggaaacggacaatgctgtccctctctctgcgttcttctgtacaaacgattccacgcggtttatttaccgccagcacaatcatctcatcctgttttgagacaactttatttccaactttcacgacctgtcccggcacgatacgcataccggtctgcgcacgctgtccatcaactgtcacgcgtccagtctcaatgaggcggtctgcctcccttctggaacacacgcccgcctcgctcaaatatttattcagccttaccggctcactcttctgtaaaaattcttctttgattcgattactcaactgcaaacactccacttatattattgtctttgaaaaatgtatttccgctgtataaaaacagaacctctgagattctgtaggaatccataagatcattgatcgttccgctgtaatatctcggatccacaactacgatttctctgtagtacggcgtcaggaacggaataaatgaatttgcgaaggaatctttcacaaggagaagacgctttgtgcttgtagaaactgtacggatatcaagaagggatgaatttcctcctagaaataccgtatactgatctttctcctttaatttagaagaatcatataaggatgtggaacgctttccttcatccacataatctacgatcaagtctgtatcttcttctgtcggcacataaatatcaatctgttccttctctccaaggttcactccgctttttgacgccaacattccgttaaagctgtctgaaactgcataggaaacatatttcccagaaagatctccttcaatcccaagggatggtgccgccgcctgaaatgcataaaatgcaccaagtgtcgtccagtgatgatccgttttgtaataaatcttctctgtcttatgtttattcaattccgttgacacgtcaatccactcaacgctatctccaagatcctttcgcaccatgctgaacatctgcgtctgatcttccggctttgccaatgctggaagtgaatgattcagcacttttgctgcatccggaacaagcatcatacgaaccggaatctttttctggctctctgaaaatgatttgattgccttgatatttgcagcaagatgattctcgtccgcaacttcaatctgctctaacagctgtccattcctgccgatgtagacaccattttccagacgacttccacaaatcctgtctaccgtaactttcagctttctccacatatctcttccaacaaactgatcatccatataagcttcaaatttctcatcataatctccgcttatcagactgctcagacgaaactttggcttcgttgcaagcatacggttctcctgcactgatttttctttgttaggcactataatatttataataagaaatagaaacaagatcagaataaatataataccaaccaattgctcctgtacttttctctgtctatctttcttcatcttttcaccttaattgttgtcgttcactgttttctataactctctagaatctaaagtacaaaaacggattgtacgtatctgcgatcagataagcaactgatattgccagcattccaaagaaaacaatcagcgtaattacagtccgtactgtatgattctcagacacattcaaaattgcacgaagtagccttgatccaattgttgttgatccaattactgccagcaagtagaacagccagtgtgtcaggatcacaaagaatacttctttactggcaaatcctgctccgccaccaaccattgcaaaaaggtaacgaagtgctgctccaaggcttggactaaagaaaaatacccagccaaccagcaccagaactaatgcataaatatgctgcaatacactcggccaccgatccacaattgccccccagacatatttctccagtacgagaactactccataatagattccccatacaataaaattccatgcagctccgtgccacattccggtcagcatccagacaatcaaaaggtttacaatatttcttgaaatcgtcacatgatttccaccaagcggaatatatacgtattcacggaaccaggagcttaaagaaatatgccatctgcgccagaattctgtaatacttttagaaatatacggcacatcaaagttcttcttaaactcaaaaccgaacattcttccaagtccgattgccatatctgaatagccgctgaaatcaaaataaatctggaatgcataagtaatacatccaagccatgccatcagaactgtcaggttacttgctgatgtcgatgagatttcttcaaaaatctttcccagcgtatttgcaagcactgctttcttcgaaagtccaataataaagagcatcgcgccctgtcctaactttcttccggagattttccttgcggtaagctgcttctcaatatctccataacagacgattggtccggcaaccagctgcggaaacatggatacatacagcgcatacttcaccagactctgctgtgcttttaccttgcctcgatatacatctacaatataggaaatttcctgaaatgtgtaaaaagaaattccaatcggtaatgccagttccctgtacggaatactgattccgaacaacgtattcgtactctctaccaaaaatccaaaatatttaaagaacacaagcagcacaatatttactgttattgcaaagaccagtgacctctttgctttcgcctcattctcactcttattctcaatatccattccgcaaaaatagtttaacaaaatactgagtatcatcagaatgatataaaccggttcgccccaggcatagaagatcagactgcctgcaagcagcaggaaattcttccattgcggcggtgcaatataataaactgccagcatgatcggcagaaataaaaacaaaaatgtaatactactaaataacatctgctcccccttctacagactcttgtcaaatgcgctgcgatattcagaagctttcgaagatactgcaaaaaagatatatcttccacgaatactttcctgtgagtcctctaaaagcttcacctgttccggcagataagaatcaaaatcttctattctctgtgcttttctctgtgcgatcgcatttgtcacattttctatctgtgcatcatttttcacctgtatcaccagaacttccgctgctgaaatactggacggagaagaataatacaaaacacccttgtagtccgcactgttcagtccataatttctcttaagcatctggtcatccatctgcacaagttctttactgtccaatacactgctcacagcctttgatacttctgaaaaagtccgcttacttccacttgcatatagcatcaatatcacaagatatcccacgataattactaaaagtatatatttcatcgcagagatcattcgctgtcttttctctgtcatagcgttgccacctccgccatcttttctgcccagattggatagaaattcgccttaaaatgaattccatcttcttcatagtactcatcttctataatatctgaattatcaatgtatccgatctgcttcttttcacacatcgcttctagtttttcattgtaatctgcgatatttgcaagtgccggctccttctctaccgcactttcctgcaccggaaaaacagcattcacaaaaatgtgcgcatccggcatagccttctgaatcttcttaatcacatctgaataatccttgataaacttgtctacatctccgtttgtcttagtcacatcgttcatcccatatgccagaaaaacaatctgcggatccagttgttttgcctgctcgatctgatcatccagttcgctgaaatgaattccaattttcgcaacaacacttgatgtatttaatacatcatactctgtaaagctcgctacaatggaatcgcccatcacaacagcaccggaaaagcgttccttcatgcttcttgtatcggatgactctcccgtactatctttcttctctaactgattaatcttctgctcgattgtctttgcatctgaagattctttgccttttatatatgcaattccttcactggtgtcgaccggtttctttgtcagattgctgactccctgcactgccaggagtatcactgtaatgaccagcgcacatccgaccccgatccggattcccagtttttgctttctttttattgttttcttcatatatctatattctttctgttttttatatactgtatagaatcccatactgttttaatagtacattttttagcaataaaagtcaacaaatctgcgcttgtatctcgccattccttttagtacaatgataggtagacgattaagaacttaaacagctgcggaggtatctgatttctatgatttcactgactttaacaaatgtaaaaaacttcatgtctcaccttctgttaaaagagacatttgacaatttctcttttattgaaggagagattattacgtttaatacctttcggattgacgggtatatacagaaagatttctttgattccgaagaagagattccggaatattctctttggaaaaatctgcgtgaattttgtttttccttaattaagggaaagaaaacaccactcggttttcattttgtcttcagcctaaattcaaagaatatttcccgtctgattgaacagaaagaactgggacttaatcctgctgacgtgcagggactatatttgaatatacgttacgatggaactcatctcacctgcgtgacaggaacttccttcaagagttttatgatggataagaccctggaacgcgaatgggatgagatggtaaagaagttctttttaaaaaaagagattgcatttgagttgatgtaaatttaaaaatccattagcaatgtgtgccgcaaggcgcacataataacagccgcctcacggtcaaataatcgtgaagcggctgaacttattactgccaatgatgagaaactcatggaacatgtttctcatcattttactttattattttgtcagaagcatcataatatcattgcttctcttaacgaatgctgtcatctcttccggacttaatggcttatgagcaagcattgcaaggtcatacagctgtttgcagatgattgacacgttctcgctgtctttgttcgttacaaggaactgaacaagtggatggttagcattgagtaccagtgttgcctggcttccgaacatagatgcatccatgccgcccataccatacatcttcatcatctcctgcattcttctgttttcctcagaaagaactgccatagatgctacattctcatctttgagcttttcaactttaacatcaagcttctcattgccaagctctttgcggaagatttcaacaaggctgtctgttgtcttctggaattcttccttctcatcttctgcaacttcatccttcagagaatcatgtacatctgcatcaattctcaagaactgaacttcctgatgtttctgctcaaggtatgtgataaatgcagaatcaatgttatgtgtcagaataatcgcatcctgtccctgggccttgaacatgttaatatactggctctgctgcacttcgtctgtcacatagaagattcttgtcttctcttcttccttcgcatctgcgtccttagactcttctgcgtctgtttttgtttcttctgccttagtttcctctgtcttggctgcgtcagcttcttcgcctttggcttctttgatgatatcttcgagagtcatgtatttatgatcaagattcttgtaaagcatagaattcttcattttctcgccgaatttctcatctttcaggcaaccgaacttgataaatggactgatgtcatcccaatatttctcgtagttttcacggtctgtcttgaacattccgttcaacttgtcagcaaccttcttggaaatgtaatcagcaactttatttacaaatccgtcgttctgcagtgcactacgtgatacgttcaacggcagatccggacagtcgatcactcccttaagtaccataaggaactctgggattacttctttaatattatctgcgataaatacctggttattgtaaagtttaatctttccttcgatggaatcatactctgtattgatcttcgggaagtaaaggattccctttaagttaaacggataatccatgttcaggtgaatccagaacagtggttccttataatccatgaacaccttgcggtaaaagtcaatatagtcttcctttgtacactcacttgggttctttgtccacagcggatgtgtatcactgatagataccggacgtcttacaatcttcgctttctgcttcggctcgccctcttcgccttcctttggttcctctgtaatatgctctactacagtatctgtatcaagaacatctgcctcatcgattgtatcgtactccggctctgcatttgccttggagaggaagatctctaccggcatgaaagaacaatatctctcaagcacttctcttgcacggtattcatttgcaaactcaaggctatcctcattcaggaacagtgtgatctcacttccaactgttgtcttatttccttcctgcatctcatactctgtaccgccctgacttgcccagtgtaccggctttgcgccttctttataagaaagagtatcaatctgaacttcgtctgctaccatgaatgcagaatagaatccaagtccgaagtgtccaatcatctcatcgtctgttgtcttatctttatatttctcaaggaactgtgtcgcacctgaaaatgcgatctgagtgatatactcctctacttcttctgctgtcataccaagtccgttatcgataaacttcattgtcttctcttctggattgacaattacttcgatcttcggtttgtatccttccggaagttcatattctcccatcatatccagctttttcagcttagtgatcgcatcacatccgttggatacaagttcacgtacaaagatatcatgatcggaataaacccatttcttgataataggaaaaatgttttcgctgtcaattgataaagtaccttttttaactgccattttactgcactcctttttatttataatctatccgtaactgctcagttacgtttcttttaatatcggctgtcaatcagctttttcgctgatatcgatagtatatttgcttgcctaatggacattctagtacagcaaaatttaaaagtcaatagaaaattagcactcctttcaaaagagtgctaataattccattaaaagtataaagtttttatgaactataccgtctccggctccggataatcctctccgaatgtctcaacagtaactttcttcattacctgtttctcaagcgggcggtcgctgtagtctgttgctgtctcagcaatcttattcactacatccattccttctgtgatcttaccgaatgcagcataagctccgtcaagatgtggcgctttcttgtgcatgataaagaactggcttcctgctgaatccggatgcattgcacgtgccatagaaagaactcctgcatcatgtacaaggttgttctctacaccgttctgcgcgaactcacctttgattgagtatcccgggccacccattcctgttccgtccggatctccgccctggatcatgaacccgctgatcacgcggtgaaagatcactccgtcatagaagcctttctttacgagtgacacaaaattgttcactgtgttcggtgcaacttccggatacagttctgctttcatgatatcgccattttccatttcaaatgtaactactggatttgccattttcatttcctcttttctttttctcaggttttctgtaaaagcaataagataattcgcttttacagatgcactctagtgatattgtagcgaatctgctttaaaactgcaagctgtatagggattttttctttaacgcatctgattataaataaatgcacaccaaaaatctgaaaaacatacagcctctttgtcccctgtatcatcgtgtttccatgctacaagacaatggtaggaactccagcaccacgcatctctggtaaatccgccgtctacccgttccagctcttcctcgtttaattctttagaagctatctgatataaacagcaaagattccttcgttagactttgatgttcttaaatctgcctgctgcggctttgtcgcaacacctttcaggctttcccaatttacaagatctttacttctggaaatggcaattatagtctcaatatctggatgatattctcacatcacaggaacttgcattactcaattcctgcaatttttaacagttcttcaaagttctggatcttatagtctgatttttcatatcctgctgcatctccgataccaactgcctccatgcctgctgcctttgctgcatcaattcctgcataagcatcctctacaacaacacagtcttccggtttttctccaagaaattctgctgctttcaggaatacttccggatgtggtttggaatgtgtgatattgtttccatctgaaatttcatcaaatgtatctagcaattctactttctcaagaataaattttgcatttttactggaagaaccaagtgccagcttgaaccctgccttgtggagctttttcaatgtattgcgcacctgatctgttacatcatctcttgtcattgtcttgagaagttctctataagtattgttcttctcttccatcagctctgctttcttttctgctgaaagtggttctccctcgtatctttcaagaataatctccaggctgtctgcacggcttactccacggagtctgttattgatcttctcatcaaagtagattcccatctcatctgccatcttcttccatgcctgataatggaatttatctgtaaatgcgattaccccgtcaaggtcaaaaataaatgccttcattttctttatctccttcatttaaaatcatacactgcacattttcagttcttataactctattttaatgtactgtatataacttctccatgtaggttctttagaaaaatccggcatttttttatattttctatttgttatttaattcatccagctttgtgggagttacgcaataattatacttcaaccgtaagatcagatatctccctaattgccgtctcaagtgcagccggatcaaatggaagaaatcctatatgtgacagttcttctaatgaattagatcccatctcaggatccccggatgctgcgattcctgcaagtgccggtgtatattttccaagaattcccattgcctgtccgttttttgcaattcttgcaagagttgtatgtcttccataaggtttcctcagatccttttccggctgatatatgaagtcataatttcctgctgccagtgtcatcacttctttttcatatcccggcaactttacttctgcttcacagttaaacggtatttcaatatggacacggaattttccgtctttctcaatcttccagttgcatacataacgtccgctgactgaatcatagctacatgcgatttcaggaatacggacatccggatgtggtgcgatcacagcttttcggaatccttcctctgccggtctgattcctgctgcataagcataaacaaattccataaccgaaccatatgcataatggttcaatgaattcattccggtatcactgatcgtaccatccggcatcacagaattccagcgctcccataccgtcgttgctcctaaattcacactataaagccagctcgggaatccttcttttaacaggaaatcataagcaagttcatactcccctgcctctgcaagtacggtacagagaagcggtgcgccaacgaatccgcacttgatctgatacatatcctgttttaatcttcctttaaattgctctacaatacggctgcgatcacgatatacctggaacttcaatgcaatcacataagctgcctgcgtatcgattgcaagtcttcctgaaggtgtaaagaattcatttaatacggcttctttgattttctcttccaactccaggtaatgagctgcatcctctgccttattcagacgttctgccatctgacgtacgatctgtgctgaacggtaatagtaaacagaagaaacaaatgtatcgtttgtgcttcctttaaagcttgtcggtgtcggtccgtccaatgcaagccagtcgccgaatgtatcaaggaaatcaaagagataagtcttctctcctcttgccgcatctccacggtcgataaagtctacccagtctttcatcagtggataacaatattccatctcttccgtatttccataataagtatacagtgtatttggtaaaaatgttgcaatatctccccatacacttccggctttctctgtatgcccgatattcggcaggaagttcggcataccgccgtctaacatcttctgctcatcccgaagatcttttgcgaatttatggaagaatgcccttgtgtccatatgataacttgctgtcggggcaaatacctgagcatctcctgtccatccaagacgttcacttctctgtggacagtctgtcggcatatcaataaagtttgacttttctccccagactgtattctgatagaggcggttgattttctcatttgaagtttcaatcagacctgtcctgcgaagatcagaataaatcacttttccaacgaaattctctttctccagttctcccggccagcctgtcacacggacatagcggaatccaaagaacgtaaagtgtggacggacaatctcttctcttccatcagaaatatagacaaactgtgattttgcatcacggtaatttttattatagaaatttccctgctgtaagatttcgccaaaatcaagaataatcttcgttcctttcgggaagtttgctttaaactcaacaaatcccgcaaagttctgtcccatatccagtacaatttcttctgccggtgtatagatgattttctttacctggactgtctctttctcaatcaccggaaggctcagacgatcctgcaatttttctactgaaaggtttcttgttccatcctgttcttccagattttctaatacttcaacctgtttctttgcattttcttttccatcccagagctgatgattcagaatctctccaagataaattcccgaatcttcgatatcggatccatagtattcccaactgtcattcgttgcaacaacttccactgttccatcctcatattccagatggagttcaccgatcgccgccattctgtctccgaaattcttgtctttcattccaagaccgaaagtacccatataccatccttttccaagcagaatggaaagtgtgtattctttttcttcttccaacgatttttctattggaaatgtcaagacctgaattcctgattcataatcgttaatatatggtgcaagatattcctctcctaatttctttccatccagatatgtttcgaacatacctacacctgtcaggtacagtcttgcacgcttgactgctttttctattgcaaatgtcttctctaatacaggatgaaaggtatcttctttcgctggtgaaatccattttccaatccacggttcctccatctttcctgtctcaaacagagcagtttcacttgttgcgcattctcctccatctgtgaaaacagttatccgatagtagtaagttgtacgtggttttaattccacttccagcttctcaccattctgtttcaggtctgcagcttcttttttatataaaatatctgtgaaatcttctgagtcactgacttcgattattgcgttagtctgtttctttccctttgcttcttccacattccatgaacaaagcagataatcatatgcaaatccaaccgggttctcaattccattgattcttacatttgtaatcttcaaattatttttcctcctgttatctgatatttaggagcaaaattcccctaacatccttatacttatgatttattatatgtgcttctgatttttttcgctatgtagtattttgctatctatccgacatattttcgcatatttatttgtgcaattcacgttttttcgttatttttcttctactcttgatatttttttcgatatttcaaaggagaaattccatgataagcagtgaacacgcgataaaaatggtcttcactattgtatcctattttttctgatatttcttccattgaaagctctgtatcaagcaaataccgaacagactctctcatttttatttctcttacaagtgtaataaaatttttgtccgaatactctttgataactttcgataaatatggtattgaatagtgaaacacttccgataaccgctgcaaagtaactgtggtataatgattttgaatatatctcaaaattggtgcataatcgattcctgattgataacttgaaaactgactataggccttataatttctcaagatgcatgaaaaaagcagatgcagccaatgtgcaagattttgatctgtatatttatcataataaaaattttccaggaataatcgtttcatgtaatctttaatttcaagtgaatccttcgtttgaaacaaaaggtaattcggttcactttctttgtccaaaatctgcttgaaaaattctgataaaatattatcttctggaagaagcggaaaaaacatcttattaaacaccttttctttgatcagaaccggaaatacttgtgcctcttttgactgaagaactatattatgacttatatagggagaaataatacaaaaatctccctcttgcagcattcttttttcatctaaaaaactaaattcacaccttcccttaaatacataatctatctcaaagcaatcatgaatatgtacaaaattagacgttccccaaaattgattgattactgtcatattagatgacactggaaccacatcaaacgtctgagaagccgtaataattttatctggaaatttaatataaagcttgcgaatctctttcagaaactcttcgtcacttaactgtgcgattcttcccaattctagaagttccggtgtctctgctttatatttatgatctttatacagactcctcaaaatttcaggaaagtcaggtgtcatatcattgttctgatgaaactccgcaattcgattctgaatatctccaattgtaatataaaaattcatccacactacctcctttatcgaattcgattatatgatagaaactttttcttgtaaacaaaaattatacggtttttgttataatagtatgtaaattaaagatttattttttttcttatgttaaaaaatgtcgaaattaagaaaatacatgttatttttttacaaggtcattttcttccaatactgctaacataatgctcataaaataaaaaaggagctaaagaaatgaaagaaacaaagacaaaccgtttgagttggaaagagacgatttccttttcaggcggagaactgggaacaaatttattatttgcagtaacaagtgcctatctcttagtttactacactaattatgcacatgttaatgcagcaatcgtcggaactatcatgttgatttccaaattttttgatgctgtatctgatattatgatggggcatattgaagaaaaatttgccaaacctggagctaaagcaagaccgtggatcaaacgaatggtgattccttatgctctatcagctatcatactctttgccgttccgaatttcacaagtactgtagctcaggcaatttatgtatttatcacttacaatctgttctgtacgatttacacaatgattgtgataccttacaactctctccaagccttgattacacagaatgaaaaagaccgtgaaatgaccggcgtccttcgttccgttttctcaacgattgcttctactattgtaaattcatttacaatgatttttattgaagctgccggaaacacaaagaagagctggctcattgtagtcagtacttacgctgcgattgcactggttgtctacctgttttgttacaaaaatacaacagaacgagttgtccaggcaggaacgaataatcagtattctgaaaaattaagtttcagagaaaatttaaaatacgtcatacagaataaatattggtggattcttactattaacggtattatttcctgtgctgtcattgcactcaacatggggtctatgtactactatttagcatatgtatgtggaaaaccacaggctgttgctattgttggaatgattctctcaatgccaatgctttttctgattccactctctaagccacttgttgcaaaaataggtatgaaaaatggtctggttgccggagttctgattatgtctttaggacgtgtggttgttggattcggaggaagttcatcattaactgcaatttacattggttccattattttttctcttggttgcagtacacagtggtgttcttatccacttctctgtaacacagtagaatatggtgaatggaaaaatggacatcgtcaagaagggatgatcatgtcagctaacagtttcggttctaaatgtggtactgcacttggaacagctatctgtggatggattttacagctatccggctacaatggagcagttcaggcacagtcatcctctgctttgactggtattacaattgtatacgttgttttacctgttgttttaaatatttttagtgcaattattttaagtttttataaacttgaaaaagaatatccatctatcattcaggaattacgtaatagaaagcaagaaatttaaggagattataatgggaaataaagcattttatccaggacagacctggcttgataccgaaggaaaaagaatccaggcgcatggcggttctgtcatatatgttgatggcatttattattggtatggagaaaacaaagaaaaaactgacggaaagaatggaatttggcattggggagtaaaatgctataaatcaacagatttatataattgggaggattgtggaattatcattcctcccgaaccagatgatataaactcttctttacatcctacaaaatgtgtcgaccgtccgcatattatctataataagcagacaaaaaaatatgtatgctggctaaaggtcatgaacacctatgatattcaaagtcagactattttaaccgcagatcatattttaggtccttatactaaagtaagagaaggacttcgtccacttggaatgaacggtggagattttgatttggtcgtagctcctgatggaaaagcttactactactttgaacgtgtacacagtgaaacaatctgtgctgatctgaccgaagattataccgatgttaccggttattacacaacacattttccacgtgtacacccaccatatgtcagagaagccactgcacatttttatagaaaagggaaacattacctgctcacatccggtacaaccggatatcttccaaatccttctgagattgcagtcgcagatacctggcatggaccatacacggtacttggcaacccacatgttgatgacaagagtcagacttcttttcatagtcagatttccagtgtatttaaagtagaaggtaaaaaagatctttacattgcttgtgctgatcgctggcttcctaataatatggataaagaatattctatttatcgtgaaatgttcgaatgtatttatggagatgaaaagaaagaatttgacttcagcagaatgggcgaagaagttgtacaaaacacttctattgctaactatgtatggcttcctctaaaattcagagaagatggaatggcattaattgaatggagagattcctggtcattagatgaatttgaataatttcatcataacgacaaattgagagggtggctgatcaactaatgatcagccaccctctcatatcacagtgcatgattttcagtacaaagtgttttaataatattttaaaatttcaggtctatctttccacagaacggatcgattggtgattttcctttgaattcacttcttcccatcatcttctcaacaactgcatccatgacatactctgaattacaatatccgttaatgtatgtcttcaccatcggtgcatcgagcaggtgatatggatttccgatacttacaaatgcaaccggaagctcgtgtaccatccaaggcatgttgttgccaagtccgaacatcgtgtgccagttcagacgggatactgtcttattggaagctgtctcgatattcgcaagatataatactagatcgtagcgactcttgaagctctctactgtatcttccataacctcaaatccttctttttcgtagacagttacttcaaatccctctttttccaattttgctttaaaatatgctgtcacacgctcatttgacgggaaatctcccatgatttcaaggagaactctcttctgtttttccgaattaagcggaaacaggttctgtgtatcttttacaagagtcacgccctggtctgcacattcttttgcccatgcatcatgcttctcacatttgagaatatcaagtgcttccgatcccggaaccaaggttccctctgcctttttctgcggaagtttcatcgctgcttttgtcgcaagaatacgttttactgcttcctcgagtctctcatcagaaagaattctattcttgtatccgtctgccatgtactgcatatcttcttccatatttctgttgaacaggatgacatcacagccattttcaatacaaagcggtacggctttttttctttcctctgcgctgcagaatccaaccattggtgtcgcatctgttgtgatcagcccattgaatccaagcttttcacggaggagatgtttcatcaggtttttggataatgttgccggaatgattctctcacatggcttcttgtcaaagtattcttcgtatgcgggcattgcaatatgtgctgccatcacagtcagagtacctgcttctatcatttcttcatagatcttaccgtaagtcttatcccattcctcacaacttaaggagttcacacttgtcagaagatgctggtcacgctcatccacaccatctcccgggaaatgttttacagatgtggcaacgccttcttcctgtgctgctttaatgtaagcttttcccatattgatgaccgtctgctggtcgtttccgaatgtacgtacatttgtgattggattatgatagttctgatccagatctacaaccggcgcaaaagaccagtttactccaactgccgcaccttcactgcagcttactttaccaagctgataagctttctctgtatcctgtgtagctgctacgagcatctcacgtccgaagtaagttccctcaatggcagaaccatttccaccgtactccagatttgacgctgtcagaagcgggatctttgcagcatcctgaagtactttatgtgcctgacgcagttcttctcctggtccttctctatacagcattccaccgatatgtttctcctgcaccagttctttcaattctttctcatcttttgtaaatacaattggacagaacagctgacccagcttttcttccagactcattccctcataagtatcttctacccatttaatttcattatcatttaaataaaatggatttgctttataatcgaacatcttctcaaacctccgtttgtcattcttattttacaatatcattgtatcgaacagaacttttttcttccatgtagtattttgttatcaatccgacgttttttcatactctataccttttcttgatttttctgttttcatcattataatgctgttatttcttgtcaaagatctcttccatctgctacaataagaattgttgatttctaattttattgttctatacaatccacgcttattttaggagaattttatggcttattatatgacctatggtgagtttcaggcgcatatgaaagattattaccagcgcaccgggaaccgcctgcagtttccggaaatgacagaatatttatataacaaagggtttctttacgattccattcccgctcccgatctgacagacgattatgattctatgagtgatgaagagtttgagaaggttgtcgattcccttcctctatccctcactttgtatgacggtgctccgcttgcccctacggtagaagaagctgatttaattccaaatgcaagagatgtatttgtcatccgtcatccaagatatactcgcccgaatcttcatcgacataattattttgaaatcaattatgtttccagaggaaaaggaacctttatttttaaagaagaagaacatatcatgcaagatggtgaattatgtattattgctccgaattctaaacacgatttttacattgatgatgattctacaatttttacaatctgtatacgaaagagcactttcgagacaactttcttctcactgatgtccagaaaagatctgttatcctactttttccgtaccattctgcagggagacggtcatgcgaactatctgatattttttactaacagtaaccggacattaaaaaaatatatccgcaatatgatgattgagtgcagcaaaaaggatatgtacagtaacacctgttgtatcagctatgtttacctaatgttctctgctttattacggaactacagtcagactatccagttctacaatcatgaaatgggatctgacttttcactggtactacaatatatccagcataattatcagacattgacattatcttctcttgctgaacttttccattacagtgaaccgtatctttgcactctgatcaagcagaacaccgggctcacctttacccaactgatcaagaagcttcgtctggccgatgcaacgaactatcttctgaacacatccatgaaggtcagtgagattgcagaacagattggatataattctgctgatcatttctccagagtgttccgttctgcctataaaatgtcgccgttggaataccggaaacaacacaaaaacgaagaaccggagtttgttccatttgcaatgaaataaaaacagtcttaaaaatgcaagcatttttaagactgtttttgaaattttatttggcggatacgcctcaccaacgaaatacgaagcattttggtggttggctctgaacagttacaactatttgatatatacattcgtatagtagttcataacaagaagatccataataactaatgctgcatattttccaacatcatttctattaaattctccacattttaatatgtaatccgcattattccaataagggctaccctcattttgcgtaatgaccagttgtctacatctactgcacttcatcgcattccagattccatcatatcgtgcaggatagcttcctcctattgaacatataattgctaaatcttccttttccaaagtacgtacactctccagctgcatatcataatctacaaactgttctacatactttcccatcatcatcattttactttgaaaataatgtccaatatcgcacagaaaatggtgagaaagaaaaacaattcttcttgcctcctgcaagctctttataatctccggtaacttttcctggttttgagaatcgaatgctttttttatattagaatgaatgtcttgacagtatcgttcgatcgcctcttttgaattttcatgcatttgtttctgaaattgttttgtataatcctcacccatatcaaatttctgttccagtgcatctcgaaattcactgaaatcattaaagcctaaaaaatggcagtatcttgtaatcgctgattttgatacaaaacataactctgccatctcacttaaagtcattttttctaatttatcataatgatttaacattgaggcagcaatctgataatttgtatcatgaactaatgctgtgttcacatacgaaagtaatttgtcagcaatagagcccattgtttttacatcactcatatgctactccttttattttttttcattttaacatatataattttttgttacaatgagctctttttcttttatagtttattttcttctgcgattcacttactttcagttaattcctctttgctaaaaccaaacagatacgtaaatactgctgctacaagcatagataaaatacaagacactactccatttataatgttcatcttggatccaccaacaaatccaagcaaagaaaggaaatttgcatttgtcattatatatacagtaacgctggtaatacttgcataaacgcccccgacaaaagcccccagaatcattgttccaaaacatctcttatggttaaagcataatccatataatgttggctctgtaataccacctacaattcccgaaactaagaaaccaaagcttgctcctttttctttcttcccttttaaacggagtgttgctcccaaagcaacgccaaatactgcccatgtcgcaaatgttccgcataatgctgctccagacatctgtcctgtctcgaaaaaacttgcaagcattggcatcataagcgccagatgcatacccgtcataacaagaaattcccataatgctgcaagaactccaagtccaataaatcctgtcttctcgctaaacagtaacaatccgttgctgattaaattaccaatgttaactcccagcggagcaataagactcaaggcaagtggtgtagaaatcaatattgtcaaaattggagtggctattgttgtgacaacatccggcatccatttattaaaaaatttgtatatcatgctcataacaaaaacgcttaacattgccggtactgctgtctgactataatctgttaacgtcactggaatacccaaaattgtaaatccatttcctgcatccatcagactcatgaattccggtgctatcaaaatagctcccatatatgctcctaacattggttctgcacccagattttttgcgccgttatatccaattaatattggcataaaatagaatcctgcctgataaataaaatgtagtaaaacatacgtattgctatcttgtgtatacagtccaagcatatctggaccacaaatgacattaattgcattggtaagacctgctgccaaaagaactggtatcaggggtgtcatgcatcctgccatataatttaacattctctttccaactgttttccatgagatttttttcttatttttttcttcttttccagcttcacttgtttcagaaattgaatttaattctccttgcttacatacagcttcatacacttttgcaacactcggcccgataattatctgaaactgtgtttctgttctgttgactccgatcactccatcaatgttttttatctcatcatctactggaattttatcatctttcaatgataatctgagacgtgtcatacaatgtgtcgctgcttttatattttccgttccaccaacagcctttaaaatacttttcgccatctgctcgtttttatccattttgctttcctcttatactttcttttgtaagtccattatttctaataacttccttataccaataaaaactgtctttcttaattcttgcgcactgttttggatctgtttccgttcgatccacatatactaatccatatctcttctgaaatccctgatgactggatacaacatcaataaaactccatggacagtatcccaataccggtattccctcatcaatcataattttcagttgctcaatatgttttttgaggtaatcgattctatattcatcatgaatcgttccgtctttttccactttatcactataggccattccattctctgtaacaatcattggcaacctatatcgatgataaattttctgcataccaatatgtaatcctaccggatcaatccctttatccatccactctgtctttttaagatagtcattttcacaaatatcaaaatcatctgaaatccaaaacggtggctgttgataattgactgctccttttttttcttcaacacaaatactaaaatagtaatttacacctataaaatccggttttgatttttttaattccacttcatcatccggttttgtttttgggaacattttattttttttcagataacttttcacatacggaggatattcccctctcacactcagatccaacagataaaattccattaactcctgcgctttttcagccgccagaacatgctctggcttgcaagtctttggataaacaacctgtatcgcacataccggtcctatctttgcctctggatctatttctctaagtcttgagattgccttgtgctctgccagtgaaacatgatagctcatctgatacatattttttagtctttttcttggatcaggttctttatctcctgtaagcatccctgccgcagtggcaattaactgctcatttactgtaacccaacgctttactctccccttgaaatgctcaaaacagatttctgcataatgtacataatcctcaatcatacgcctgtcaagccacccaccatacgcatctactaaagcctgtggacattcaaaatgatacagtgttacaaaaggttcaattcccttttctaacaaataatcaatcaattggtcataaaatttcagtccttctttattcggtctgcctgttgcatctggcataatacgactccacgagaatcccattctgtaaattttcattcccatttctgccatcagatccacatcttccttccaatgatgataatgatctgaagcaattttgttatctgcaatatcaggatttcctgttcctatatctgttgttgcaggcccttttcctccttcatcaaagcctccttcaatctggaaagcactcgtagatgctccccacaaaaatcccttcgggaattgtgtctttgtcataatatctcctatcattttaaatcactataagttaccagacgtaaatcttgttgctccaaccagttcttcactttactgttgctgagcatttcagcctctactgcacggatcattgtcatgctcgagttttttagcagataatcatcaatatatcctggatgaaaaacaagcatatcgcatccatcctcatgaagatttagaactgcatcctgtacggctgtaaatggatttttttcatactccgcaaaatcttttggaatatagcaataaatctttgtattacggaacataacataatcactgttttctttcaccatttccaaatatggtaaattatatctctcagccacaatctttaagcctttgaagaaattatcactcgcaactgcatggccttcaaaatattctggtcttttccctgttaattcaataaattttttgtattgtgcttcgatttccattactacttcatctaagtttacaaaatcaatcccttcagtttttgattttctgtactccctagatgttttaaaacatccatcttccttacataaagtgggaatcaatgctggatttgttattggttttccaacacaaatatttgtatgctgtccaaggcatacattttctttttttaataatttcaatccatccatcgcagttggcatattggtcataactccaacagatttcacaatacctttatttactgcttttgcaataccataattcacaccatcactgtatccaagatcatctgctctgattaataattgtttcattaaattttctcacctcttcctttttattttccttatcaaaatcataacataccttctttctttttgggtttcagaaagtacgtctctatttcatattttaaaacaagctaccaggatttatatcttggtagcttgcttctacttaaaattcaactttgttacttatcactcgcattgtgcaaccggatctccttcattgccatgtcttggacatgtctggtacgcaccgcccacatgatatttttaattcacattatgtaatttaattatttattgatcgtaatagctcctttcgttccatcttctgcttttacagtcaatgttaccgcctcagctggcttcttcagaataatctgtgcacgtccgccaaacagttctgtcacaccttcattgaagttataatttggctttggattaccgcttccaaatccaagtacttctgcctctccttcaacagccagtgtgatcttctggttgtcagctgctgccagcacaccattctggtcgcgcatctctacctggacatagatcagctcctgatcggaaccttttaatccggcatattcttctgattctaccaccaatgttctatctgctcccgcagttttaagctcatttcttccgatttcctgtccctgttcataggaaacagctgtcagagttcccggttcataagttatctcgaataatgtacggaatccggcttcttttcccgctgcttttttaccgagagaaactccatttaacagaagttctacctcatcgccctgcgcatagacttccacgatggcaggttttccttccatgccttcccaattccagcttgctgtagagtcactgattacccaaggagtcttaatcaggtgttctccataatgtgtcgggttctgaacagcagtatatggggtcttactaagtccaaaaactgcttctctgtaataagatgccggacggcggaatccagtgatatcaaaatctcccggatatgcaagctgtgccgggaatccggctccaaatccgccttcaccccacttatatgcagggattccaacaccggcctcaccgatataatcccatccggtccatgtgaaatcaccgattacatgtggcagtttttccacaagatcccaatttctcgcaatctccggtggataggtctcacttcctacgattacacggttcgggtaattttctccatctccctcataacgtgcagtcatataattgtatcctgcaatatctacacctgcgcatgctttttccagtcgctcactgattgcatgatgtaccacgatttcatctagatgtccatccatcaaagtcatgaagtcgttgacatttccatcaatctttccttctgcacttaaatctgcaacaacatctgcaacaatctggtctacctgatctcccgctgcaaatacaccattgatcgaagcaagcgtaaatcttgtgtcatctaactcatggatcttgtcactgagctgctggcatgtctgggcgcccttgtcggttccgatctccgggatctcatttcctacagaataaaggatcacagctggatggttatagtcttttcttaccatcgctgccacatctttcttccaccactcctggaaatacagaccataatcatagttggatttcagacggttccacatatcaaaagtctcatccataacgtacataccaatctcatcacaggcacgcagcatagccggagccatcggatgatgggacatacggattgcattgaatccagcttctttcattttcagaatctgacggtactgtgcatcttcataagttgcagcaccaagaagtccactgtcgtgatgaatacagccgccacgtaagttgactgtctttccgttcacacggaaaccacgctttgcatctacagagagcgtacggattccaaaagtatcttttgcttcatctaacagtttcttctcttctgtatcttcgtatacttttgtttcatatgtatacagacttggggattctgcactccaaaggtctggattttctacaagaatacgctgtttcactgttctgctttcgcttccaaacagagtagcatgtgtaacctctttacctgtttcttttccctcgctgtcacggatcactgtctccacaaccagattctgtggtgcagctgtcttattttctaattctacagatacctttaatgttgcataatcctcatccgcattttctgtcttaatctgtactccttccggtatgatgtgtgtcagttcagattccaaaagatacacatctctgtatattcctgcaccagaataccagcggctgtttgtcattgcaccggcacgtacctgcacacggatctcattgtcttcccctattttcaggaaatcattcagcggtgcgtagaatgtcgtatatccgaatgggctctttgctgcaatctgtccattcacatagacaaatgcattcatgtacacaccttcaaatttcaacattacagtcttttctctatactcatccggtgcatggagcatttttacataagtgtatacatctccatcacggaatcctgtatttcctccatttaagctgtctggatttgcaggcttcccaatcattgcatcatgtggcaatgtaatatctcttgcaatctccgggatattccatactaatgcaaaagaatctttatcttcccaaaatttccaatttttattccatttttgttctaacatctacttttcctccatttttacttgaaaaacatagcttccggcttgcagcgtcttcgactccatcccttccacgctgaactctgcctgcgcatcaaatggcactatttccatccttctcctgtacataccgttggctgtgtttcttctccgatataaagttctgcaattgcacagcaggaatccaagaggatgttcgatattatttactctcaactgactgattttcatattgttttacttccttttcgttacacttcatcatatagaattgattactttaaaataattgtaaaaaattctataccggttgtccatgttgtttctttttgagaatccgacattttattagatgaatcttactttccacagtaccgatacctgacaatgcaattcacttttccggcagaaaaaatacagctatcagaatctttcatctgataactgcattttctactgccatttcctactgatttgtacatattaactgtaattataacctcatatggttgaaatgtacactttcccctcctttttttagtcactcgtgacattgttgattttcgtgcctaacgctatactaagtacataagttaaacaaaccaaaatcaactaccaattaaaaaacaaaaccaaatttagtcaaacaagtaaaaagtaatcatttaaggaggcacttataatggcaagtttatctcttcagggaattcagaaaatttatcctaacggatttcacgcagtaaaagatttcaatcttgaaatcgctgacaaggagttcatcatcttcgtaggaccatcaggatgtggtaaatctacaacacttcgtatgatcgctggtctggaggatatctccggcggtacattcaagattgacggaaaggtaatgaacgacgtagagccaaaagaccgtgatatcgcaatggtattccagaactacgctctgtatccacatatgacagtatatgataacatggctttcggactgaaacttcgtaaagttccgaaagatgagattgataagaaggttcgtgaggctgctaagatccttgatcttgagaaactgctcgaccgtaaaccgaaggccctttccggtggacagagacagcgtgttgctatgggacgtgctatcgttcgtaatcctaaggtattccttatggatgagccactttccaacctggatgctaaactgagagttcagatgcgtatcgagatttccaagcttcatgagaatctgggtgctacaatcatctacgtaacacatgaccagacagaagctatgacacttggaacaagaatcgttgttatgaaagacggagttgtccagcaggtagatacaccacaggcactttacaatacaccatgcaacctgttcgtagcaggattcatcggatcacctcagatgaacttcatggatgcaaaatgtacaattaagggaaatgatgttactcttacagttggaaaacatgttcttaaggtaccggcttctaagaagcaggcactgatcgatggcggatacgatggaaagacagttgttcttggtattcgtccggaagatgtacatgattcacaggcgttcatcagcaactctcctgacagcgtaattgagtctacaatcaaagtttacgagctgcttggagcagaagtattcctgtacttcgatgttgagggaactcagttgacagcacgtgttaacccacgtacaacactcagaactggagatcatgctgtatttgcacttgatatggaaaaaattcatctctttgacaaagacacagagttgactattacaaactaatcctttacaattaaactaaacacggagggggctgtacttttctcggaaggtgcagcctttcttccatctattactattttatttacggagattactatggctaatacatccgaacttgaaaaaggactcaatgaattaaaacgtttgaccggaatcacacttacagtgactgccgaagattctgaacaggagcagatggccctggaacagattcgctgtctctgccttgcctaccgggaaaaatataataaaaatgattttcttatgggactgatgaccggtggtgttccttcctatgatgtacagcagcgtgccgcacggctccacattgcaccggaagaaaatcgaattctctttttgattgaaataaaggaacctgatgagattattggagagatccttaaaaatctgtttccttctcaaacaaaagcttatattgttcctgtttcaaaagagcgactggctgtattatatccatttcatgagacaaaggattccaaagattctgctgatgaacatgcaagacatctggctcatgcgattgttgacacgctgaatgcggaagctcttgcacatgttcaggtttcttttagtcagatgattccttctcttttggaattatccggggcttttcgtgaagcaagtcttgcactgaaagttggaaaacttttctatccggaacagactgtctttccatacaatgaactggggattggccgcctgatttatcagcttcctgtttctctgtgcgaaagctttctccaggaagttttcttagacaagattccggacaagctggacgatgagacactcctgacgatcaaccgtttccttcagaataatctgaacattgctgagacttcacgccagctccatatgcaccgcaacacgctgatctatcgtctggaacagattgaaaagcgcaccggacttgatttgagacagtttgaagatgcaatgacatttaagattgcaacaatggttatgaactatcttcatgctgaaaaaggaaaaaattgcactgcggtgtaattgatatatattaaatactatataagaaaggacttataacttatgaatgacgcattatgtgaacatattgtagccagaaaatcaaaaccaatggattttatcatccgcattcttattattgtagtgatcgttgcggtcgcaatcggaggaatgccgtttcttggattctttgcttttgctcttgcagcaatcctggctttacttgcttattattttgcatttccactcttaaatgtggagtatgaatattcccttctgaatcacgatctggatattgatgcaatttacagcaaagagaaaagaaaatccaaaatgaacttagatattcagaatgccgagattattgccccaaaaggatctcaccgactggactcttatcatccggaaacaacttgcgatttttcatccggaaatgcaaatgcaaagattttcgcaatcatgatcccgatcaatcagaaaatgacttgtgtttatattgaacctgatgaaaatatgattgaacatatgaaacaatggatgggaatgaagatgttcgtagattaatattgaatgtttatttctaactcaaacaagtaccacaatcagcaactactaattgtggtacttgttttttcttttctgtctggttgtaaattacaaattacaattacatacgcaagacatcataatcttatttttcaacaacatctgctatatatttacatgcggcaagtgcggctactgcaccgtccgctgccgctgttgtaagctgacgtacttcttttgtccggcagtctcctgctgcataaattcccgcttctgatgtcttgcaatcttctccggcaacaataaatccaccctcatctaactgaacaacatcagcaaatttttcattctgtgcaatctgtccgacagctacaaaaattccggaaacagcaagttctgattcttctcctgttactttattcaaaagccgcagactttccaccatctgctctccacggatttcctgaacagttgtatttaagataaactctacattttctttctcttgcagacgttttacaatctgatcttctccacgaaattcgtctcttctgtgaatcagataaactttgctacagtaatttgataaaaattctgcatcctggagtgctgtacttccacctccgacaactgcaacttctcttccccggaaaaacattccatcacaagttgcgcagtatgaaactcctgcacctgtcagacgttcctctcccggaactccaagatggcggtgtgttacacccgtggcaagaataatgcttttacattcatattctttttccgttgttacaatcactttataatccgcttcttcacggatacctgtcacttgctccatcatagtctgtgttcccagctttactgcctgatccatcagattcatagagaattcactgccactcacacttgcaattccaggataattttccacattcggagaagatgtgatctgtccgccgaaggttgttccctcgaagagtacggtctgctttcctgcacgctggccatagatagccgcagtcatccctgcagttccgccaccaatgattccaatatcataaatccccatattttttcctttcccaacaaactgtttctacattttctgattgctgtaattcatttttcatttacgctaaactgtaatatgtttcaatcacttcttacatatttctggacatatctgcacagactttctctgcctcgatcactgcgcttctaagtccaaatttctcaagtacacgcactgcctcaatcgttgttcctgccggtgaacacaccatatctttcagttctcccggatgcttccctgtctcgagtaccatctttgcacttccaagtactgcctgtgctgcgaactgatacgcctgtggtctaggcattccctcggctaccgctccgtctgccattgcctcgatcatcataaagatatacgccggtgaacttccgctgactgcaacaactgcatcgatcaaatgctccggcacgatttctactttaccaaaagagctaagaagctccagtgcatagttcttttcttcttctgtcactgcatcattcgggcatgccgctgtcattccctctccaactaatgctggtgtattcggcattgttcttacaatcttaactttctttccaaactgctcttcgagccatgcgagagtcttgcccggtgcgattgtaataatcagctggtcttctcttactgcatctttgatctcagcaattgtctgtgcatagaattgtggttttacagagagaactaatacttctgctttctgtgttacttctatattatctgctgtcacatgaattccatgctcttttttcgcacgttcacgtcctgcttccataatatctgaaccgatgatctcttccggaacaatcattccctttttgatgattccgcccatgattgctcctgccatatttcctgttccgataaatcctaatttcatgatcttaggtctccttttcttttatcgttactgttctaatcgcagtaaccttttatctacatgtatccgtctcttacccagaattttttctcatcctctaatggaatttcttctgtgtccatccagtcgattgtaataaactgattcctgttcagcccttttagcagttcattgatcagccattcgcgtccctgaacttccattgtaacggttccatcccattcgttctgaacccagccaactagatttagtgaattcgccagatatttcgctgtatagcggaatccaacaccctgtacacgaccgtgaaaaacaatgtgctttctaacttctgccatatctgatcactcccttgaagcaatttgtgttgtacactaccgttattctaacacatttttttaccttgtacagttcttttcggtaaactgttcctgcttcctgtgttataataagaataacttttctgaaggaggacttcgagaacgaatgagtaattatgaaacatcaccgatttctgttcaaaaagaattgataaataaattgcgggatacacagactctctctaaaaatgaatggattcggctaattgacggaagaacccctgaacttgccgactatttatttgaaaatgcgcgcgaagtacaaatcactcactatggacatgatgtttatgtccgcggactagttgaattcactaactattgtcgtaacgattgttattactgcggtatccgcaaaagtaatctgaatgcacatcgctaccgtcttaccaaagaagaaattcttaactgttgcaaaaccggatatgaacttggttttcgcaccttcgttcttcaaggtggtgaagatggctggttcacggttccgcgtctggctgatattgtctctgacatccacaaaaactggccggactgtgcaatcacactctctgttggagaaatggaacatgatgcataccagactttattcgatgccggcgctgaccgctatttacttcgtcatgaaacttatgatgatgcacattaccgtatgcttcatcctgcttccttaagtgcacttcaccggcagaactgcttatgggatttaaaatcgatcggctatcagattggaaccggattcatgatcggtgcacctttccagacaactgagaatctcgcagatgatatgctttttctaaaggaactgagtccgcatatggttggaatcggtccgtttatccctcaccacgacacacagtttgcggatgaacctgccggaacgctggaattgacactttatctgcttggattgattcgtcttatgctgccaaaagtcctccttccggcaacaactgctctcggtacgatttctccgactggaagggaacagggaattctcgccggagctaacgtagttatgccaaacctgtctccaacagaggttcgcaaagattatttgctttatgataacaaaatctgcaccggtgatgaatcggcacagtgcaagaactgcctggctcaaagaatggagtctgtcggatatcgcgttgttgtagatcgaggagattccttgaataagtaaaaaggaggttgctggtcgcacattgtgtgaacagtaacaaaaggagtccatggtatgcgacatatcgcatttccacggactccttttctattcgcacctcgcctcacaacgcagtgtcatcatttcattttctttgctatctgtaagaattactctacaacagctaagatctcaatctcaacgagaacagccttcggaagatccttaactgctacacatgaacgagccggtttgcttgtgaagtatttctcgtatactccgttgaatgctccgaaatctgcaatatctgcaaggaagcatgttgtctttacaacgttgtcaaagcttgatccagcttcttcaagaacagcagcgatattagcgataacctgctctgtctgtccttcgattgttgtagcatctacattacctgtagctgggttaatcggaatctgtcctgaagcgtataacattccgttaactacctttgcctgagaatatggtccgattgcagctggtgcctttggtgttgaaattgttttcattgaattctacctcctgatttattgaaattataagttcttaatgaaattatataacgttaaaatcgtttagtcaataaaatttcattcacttaactatttttcattgacttctttttcacacaaatctatctatccatgataaaataaaaccatcaataaactatttgtctgtaaagaaaaaatgagttgtattcaatacaggcagaaaggacgcatgattatgccaatcggaaatttaaaattaacttcacttgataaaaaaattctgcactcatactgtcagacactcgatggactttccaactatctcggaaacggttatgaaattgtcctgcacagcctggaggattatgaacactctgcgatcaaggtcatcaacggatatcacaccggacgtgccgaaggagccccgattacagaccttgcattaaagatgctggagcagatacgccgcaatgaagagaatgaccatggtgttatttatttttccacaaatgtaaaaggagaacctctgaagtcaactacaattcctgtcaaaggagagaaggacagaattatcggactgctctgtatcaacttttatatgaatacaacgatggcagatttcttccgcaactttgctgttccgattccatctgattctgacggtcttacagtctccggtcagattcatgaaacattttcccagagtagttctgatcttcttgagcagaccattcaaaccgttcgccaagaagtattgatggattcagcaatatcgagcacaaataagaataaagaaatcatttttcgcctttaccagcaaggaatcttcaatctgaaggatgcggttattacaatcgccgatgcattggggattagtaagaatactgtatacctgcatctacgcaatcttgagaaaacgaacaattaatgctacgtgatatgcaaattactgatatctacacatcaaaaaggacagagccactttcgttttacctgaaataccatttcaaatttcatttcattcgaaagtgtcctgtcctttttcatcctttattttcctgccggcatatatctcagaagttctcccgccacgctggagattggcattgtctgaagccatacatgtccaggtccggtgacaactgtattgaacacaccttcaccaccgaataccatattcttaagtcccggtactgtctgaatttccatactgcaagtcgcatccattgctgcaagatatccggtatccactactatctgctgtcccggtctcagttcatattctaccacatgtccgtcaaattccagaaatgctattccatttcctgaaagtctctgcatgataaacccttctccaccaaaaaatcctgctccgaatttcttttgaaagaaaatagagagatcaacaccttcttctgaagcgagaaatcctgacttctgtacaatcagttcctggcccggtgcaatctggcgcgctacgatctgccccggaaaactggatgcaaatgcgatcatcccattacctcccgttgctgtataacggttctggaacaatgcctcgcctgaaaacattcttccaaatgcttttccgattcctccatttgatgtggtttccatcttcatgttcggagacatccaactcatcgagccacgttctgtgatcattttctcaccattttccagatagcagactaccaccggaagtgtatcacctttgatttcatatctcatgtttcattcctcctaacgcattcttctcaatattttatctaatctaacaatactattcttttgcgttattttccagtacaaaattttcttcttttttctctctcatctctaatttaggaagtatgatctctgccttaaacaaatctgcctctgttgtaatattcaaattaccatgctgcaactgtgcaaagctcttagcgattgccaggccaagtccagatccttcggtatttcttgaagaatctcctcttacaaaacggtccgtgatctcctctgtattgaaattcaattcccctgcggaaacatttttcataaagatctgcacgtcatccggccgctcattcatttcgatataaactctcgtgtgcggcattgcgtattttgtgatattaacaatcaagttctcaaaaattcgatatgttttttcactatccaaccagagaaccaccttactttccggaagtttccagcggaactccaaatgtgcttcctgaatcttttcctcgttctcaagctccgcctgacggatcaatcccacaagatctaccttcatataattcatctggattgtcttacttgccgccttactcatctcaaagagatcctcgatcagggctttcagacgaagagattttctctcaagtacttctgtatattcttttctcttttcttcatctttttcattctttaaaaggtcaatgtaagtaatgatcgcggtcagcggagtacgaagatcatgagaaacatttgtcacaagctctgtcttcatacgctcatttttcacttcttcatctactgccttcttaaatccactctgaatcttctttaattcatcctgaaccggacggaagattccgacatcaccttcaatcggaagatcaagatgaccttctgccagctgattcgttgatttaagcagcagctgatatttcttcttgattccatttagtactttcttcattacaaagaataagataatagaataaatcgccaacggaagtaatcccatactgtaagaaaataatttcactactaagagcagaagaaagttcaaaatcacgattctgaggattcctttatttcctttatcacgtaagtctgtctgaagaatcgcttcatattgatgatgcaaaaatgctttaacatctttccatgctttcttcaataaatatcttttttcatgtacttctccacgattttcctttccccaacgaatcaacattcctgctattgtgtgttctttccagtaatttcttctatctgtaaatataagtctgagactctccgccacgcagaagaaaactcccagcaggcagaaccagatgatccagttgattccaagcatactgatcgtattccacataatatttacagacggatgatagttctcaaatgaccagtgtactaattccgcaaatgccgaataacctatacccaatgcagaaatccccagaatcactgcaagttcgaatggcatatggaataattttccttcgtatcttccaactttcggaatacatggaagaaagaatgctacaagcagaactcctaaaaagaagagtgcagcagaactccagaacatggaataattatattccacatactcatcctcctcctgatttgcagaaatgaattcatcataatttgcatctgtcattccatagacgatactgattccatctgtttgcttttcatcctcaatcaaatcctccagatctgcgtccatacaataataggacagatctttctcaatattgtatgcttcttccggtaccaatttcgtaccgctaactattacatttgacattgttcctgctgtgccatacttgtattcaattttcagcgcatacgaatcatttgacttcaacgcctcgtttatctgatcatcgttttctttaaataaaggattgccctctttatcaaaaatctggtaatccatatattttttaaagagagaaaatgcactgtttgacatcatctccatttgctccgacgcatccttcacacctgtgacctcgttatacagaatgcggtttccagtcgcaagagaatagtccatcctctctatacaatcttctatatcctcctctactgtaactgtcgatgcgatattatttctactcaccacataatagcttcccacaattcctgctgcaaacaggctgagtattactatcgttattattgtccttatcttacggctgcttttcaagtttgtatccaactccccacaccacctttaaatattttggtttcttcgggtcaatctcgatcttctcccgaatatttcttacatgtaccatgattgtatctgtattaattgccttttcctgccatactctttcataaatctcttcggatgaaaagactcttccgggattctttgccaaaagaagcagaatcttgtactcgattggagttaatttcaccggattgccatccattgtaacttctaccgtatcttcgttgatctcaagtcctccgattacatgtacattctcccgcggtgccagcttctctagaaacctgcgataacgtctcaattgagaattcacacgagccatcagttccattggtgtaaacggctttgtcacataatcatccgctccgatattaagtccggtgatcttatcaacctcttctgattttgcggacaacatgattacaggaaaatcatatttttcgcgcaatttcattgtcatacggattccatccatacgtggcatcataatatcaatgattgccaaatggatctcttctctctcaagaacttccagcccttcgattccgtccgctgcctgaaataccttgtacccctgactctgcagataaatttgtacgccttctctgatttctttatcatcctctacaattaatacatgattgatctccattttgtttcctcctaaaaaaagaacctcctttatctatctacagaatactctgtaaatctaaaggaggcttttatatgtttcaaaagattttcttaagcttactatagctttttcaaaaatattggtctcttagttctctgcattctgctctctgaagaaaatctgacccgtagaagcgtccattccgtccacaatcgccaatgactccagctggaatccaaggttacggatgattcttccgcctgactggaatcctttctcaattgcaattccgataccttctactgtagctcctgaagactgaacgatctggatcagtccttgtagtgcacatccgtttgcaagaaaatcatcaataataagtacatgatcatcctctgaaaggaatttctgtgaaacgatcacattattcttacacttatgtgtgaaagattcaacctctgctacatacatctcaccgtctaaattgatgctctgagacttctttgcaaatacgaccggtacatcaaagtgttctgctacgatacaggcgattcctataccggaagcttcgatcgtaagaatcttgttgatgttcttgtcagcaaatctcttcttgaattctgcacccatctgattcaaaagtttaatgtccatctgatgattcaggaaactgtcaaccttgagaacattgccctcttttacaataccgtcttttacaattctttcttccaaaaaattcatctttctacctcttcctctgtgatttccccaaaatgtgttactgctcagtgtaaccccaaaaatatttcttaaagtatagcacaactccatataagaaacaacgttaacaagacgaaaaaatagtacaaaaataattctaaaaaagcactttccttatccggtttatcaaaaccgaatcgcaggaaaatgctttgcgctatttctgtacaactatgattctgccctccaaaattagggcaacaaaaaagcgggtgatgggaatcgaacccacgtatccagcttggaaggctggtgttctaccattgaactacacccgcatttcgtgtcttatctttgacacgaatagtatcttatcatactctttttaaatatgcaagtacttttttcaatttttttacattttttattttcccatctcctgcagtgcacggataaattccagatcttctgcacgaagcttcagatttgtctcgtaatgagctccgttcggtgctgtcacattgatctcgatgatcgtaccttcctcaactgcattctgagctactgctcctaagaacattggaaacttcggatgatttctgcgaaatgtgtccatatgtccttttaattcctgtatttttccaagctgtgaaaaattcatattaactgtcctgttgctgcgcatatcgcaaatcacatcgtactgcgccggcaacattttcctttctgccctgtcggctttttactttatcatgatatacgaatcagagaaaaaatacaacttttttgacttatttctctcttcgttatataatagaaaaagtgaccgttgtccccctttttactgaatcattataaccagcaaggacagatatcacggacttcggttttcagattagagaaaagaggtaacatccatgagcaagagaacagataagaagaaacagaaaagaattaatgaagtacatacaactgcagcactagctgctcagcctgtagtagagacagctgcaccaacagctgaacctgttccggaagtgactgtaacagaaacaactgcgccagtaaatgctgctccggcatataatcttttcatccagtatcagaacggcgaatatgacgctgctgtacttgcagagaagattcttgataaatgcaaagctgaaggtatggacagctccgaccttaagatctatgtaaaacctgaggataagaaagcttactatgcttgtgccggcggaacaggtgctattgagttagcttagactgatagaaagaaagtctgtgaaagaatctactcttaagattcttttcacagactttttattttgactgttataccccaatctttttactatactccgacctttttacaaacatctgccagacagcatctgtcgcaatacggtttcgttctcgcagtacatatctctcttccatgataaacaagacggtggcaaaggtcacttccttcttccggcgggatgatcttccacagagccatctccactttcttaggttctttgattccgtccaccagaccgatacgattcgtcaggcggatacagtgcgtatctgtaacgatcgccggttttccaaacacatctcccatgatcagattcgcgctctttcttccgactcccggaagttttaataaagcatcaaaatcatcaggaacctttccaccatattcatccctaagcatcttcatacaggcactgatatctcttgccttactctttccaagaccacaaggacgtacaatctcttcaatatcttccaccggagcatctgccagtgcttctacggttggatatttctcataaagaccttccacgactacatttactcttgcatctgtacactgagctgccagccttacactgacaagcaatttccatgcctgatcataatcaagtgtgcatccggcatccggatactctttcttcagcctttcaatcacttcaagcgcacgctgtttctttgtcatttacttcacctcggcatttttctttaattcttccattgcattcttaaacttgtctgatactgctgtaggatttcttctcagctgtctcatagcatttacataatttctgtctgtacgtgagcctaatttccgtctctcacttaatatattggaacgcatctgggcaagttcttttctccagtttcctttcgattcagactcttgtgcttcattctccagtcggacagtacgaagcagtgcctcaaccttctctgaaagctgtgtaagctgttcttttcgttctctacgctgttcttctatcttcgcaagatacaattcttttcttgtctgcttctccgctgctttcatctctttacgctcttcatacaacagatagctgtcctcaagcctttcctgtaccccttcagatgcacgtttcagccgttcctgaacaccttctgatgcatctttcagtctgtcctgcatttcctcagaagcatctttcaggcgctcctgcatcttctggatctgttctttgctggcttcaagctgtacaaggatacgtttcatatccatagcctcgttgaaggactgtgtgaagtcaactgctgctgcgattgtcagaacaaatgcaaggatatcggctattgtaaccggaatcaacaataccatatgttcaaatggaatatgtacgacctttaccataagaatggagaatactccccagcacaagcttgccagtggacaaatgtatcctctgacattaaatttcaggtttctataatcccagtaccttacgtggaacagacgctccatcgtaattcctgtaaaatactccaggattgtcgcaccgatcattcccataagaaagacaagcaggatgttatctctgaccggaatcgtcacaatcaggacaaccattgctccggaaccatagagcggaagcatcggaccatgcataaatccgcggttcaccaagcggtgctttctgacagaaacgtaacagctttcccatatccatcccaaaaaactgtaaagaaaaaagaataaaacccattgtgataaatcatattcctgcatttttcttcccctttttaaaagactcctacgctctgataaaatgtaacgcagaagtctctttcgtaaaatcttttagtttttctcctcgatctccatcagcagatctactctgcgctgatgacggccgccttcgaattctgtattgatccatgtatctacgatcatctttgcaagttctccacctaccacacgagctccaaatgcaagtacattacaatcattgtgtgctcttgacatcttcgctgtaaatggctcgctgcagacacatgcacggattccttttactttattcgctgcaagagagattccaagtcctgttccgcagatcaggattcccttctctacttctcctgctacaactgcacgggccactttctctccatataccggatagtcacaactttcggatgtataggttccataatctacaacctcatgacctttctctttcagaaattctacgatttctgctttcagctccagtgcggagtgatcgttaccaataccaattttcattttaacgttccatcctttctacatttcaaaatctgatataccgtttctatcataccaaacttgtacggtcttgtaaactcacaccagatttgtttctaatgtaatacaaaatgttgctgttcaggattcccgctttgcctgacgatagttttgcctgacgataaaaagagaagcacgaatagcttctctttttccttctgtaaaccgtcactatgataactttcttctgttatgcacgtaatccgttcactttatatcttagaataatgtattaaaacgttccattgcttcctttgtcttctcatgttttccaaaggatgtcagacggaaataattctttccattttctccaaatcctgctcccggtgttccgacaatctgtgcattttcaaggagataatcaaagaactcccaagactccattcctttcgggcactcgaaccagatgtatggtgagttcacgccgcctgtaaatgagattcctttcttctcaagtgtttcagcgatcatatgtgcattttcacgataatatccgatattctcctgacactctttcatgccctcttctgtgaataccttagctccggcatactggatgatatacggtgttccgttgaactttgtacactgtcttctgttccacatattgtgcaggctcaatgttccgccgtttgatgtctcaaacacaagttcttccggaacaactgtataggagaaacgtgtacctgtgaatcctgctgtcttagaaagggaacagaactcaatcgcacatttctttgcgccctcgatcgcatagatgcttcttggaagtgtaggatctgtgataaatgcttcgtatgcggaatcatacaggatcaccgcatcatttttcagtgcataggcaacccatgcctctaactgctctttattatagcatgctcctgtcgggttgttcggagaacacaggtaaatgatatctgcctttacattttcatccggcattggaaggaaatcgttttcttttgttccgttcatatagataatattctttccatccattgtatttgtatctacataaacagggtaaaccggatccggaacgagaaccacgttatcctttgcaaaaagctctgtaatatttcctgtatcactctttgcgccatctgaaataaagatatctgtagcttttacttctacgccattgcgtgcgtaataatctgcgattgcttcctgtgcaaatgcatatccctgctccggtccgtatcctttgaatgtctcagatacggcctgagaatctactgcttcatgaagtgcctcgatcacactctttgtcaatggcaatgtcacatcaccgattccgagacggataatatccgctgctttctccggatgtgtttcctcatatacttttactcttcttgcgatctctgcaaaaagataactgtcttttacattctgataattttcatttaattttggcatcttgtcaaactcctttcccagctgctttcatgctgttcacagtattctgcaaccaataactctagtattcctatgtgttatattaacagattttttttcattcgaaaagaagttgaaaaaaagaaacaagattttgtaaaatcttgtttctttgataataatttcagcactttaactgtgcaaattgatgatgcgataaagaatatttttctttttttctttcttacaaaagccagataaccagcaagattacctccacaacaaagatcacaggcactgtaatcataaattttgctttccgtgtcttatgccggaagcacatcatacctgcgattgctcctgcacttccaccgatcagtgcaaggattaacagcgttttctccggaaccctccatgcacctttcttcgctttccatttatcaatcccatagatacaaaatgcaaataaattgataaatatcagataataccagaaatatttcataagatgatctcctccttcaaggcaaaggaatagatgatcttctccttcaccggcttctctaacagttgctccaacgcctgggcatagtaatcaagctgtgcatggtacagttctttcaattgagatgcatttctgactctatccgtcttatagtccagtagtacaatcccgtcttcctcctcgaaccagacatcaataattccctggatgagaatggtctcttcctttcgattttcatccgcttcctgacttttcttctgaatgtcctgatagatctccggatagatttctgatgcagctactccgagaacaaatggctgttcctttcgaagctttccatttcctgctgcttgtgtcattcgtcttccactctcactatttaaaaacgcaagaatatctttcgtgcggatacagtctgccatctcttttgacagtcttcctgcctgatagaacagttcgatttcttctttcagaagttcctctgtatactcttttgaaaaatcatgaagctcgagaaatttatgataagcacttccccttgaagctcctgtcagtccttcatcctgttcttccatgaaatgtggaagcagcggcacaatctccggctcctgaatcaattcttctcctgcttcttcccgcaaagactcacgcttcttcaactctgaaactgtaaatttcagcttcatttttccttcttctttatatggatacaggaaattcatctgctgttccagcttttcttctgctcccggaagataaaccttcgatgtatcccagtgttcaagcacttctcttgcaattatttccgcctgtcgctgtgcatcttctgtaaaatccatctctcctgcatcaaaaatccggactttaatcggcaattgctgcacctcttcgctttctgttttgagaattccacacaaaccatcttctctcttgagatcttctgcctgaagaagtgccggaagaatccagtccaggtaacggtttgcgctctctaactgataaaggctcaatggagatttcctgtctgtcatatggttcacatatggttccagtccgtcttctcccattttcagacttcctgtcagaatcagcttttccttcgctcttgtcatcgctacataaagcacacggagttcttctgcaagattctcaagctttgtcttctcctggatcattttcttcaaaaaggtcggtgcctttgtcctcatctcaagatctacaacgtcaattccaaccccgtttttcggatggatcacaatacttccttttagatcctgtgtattgaattgctttcctgttccggctacaaaaacgattggaaactccagacctttacttttatgaatactcataatgcggaccgtgtcatcctgctcgtctatgatacttgcttcaccataatcaacatcatattttttcagttgctcgatatagcgtacgaaattaaacagacctttataacttgtcccttcaaatgctcttgccttctcaacaagcatttctacattggcttgcctctgtgcgccccccggcatcgcactgataaataacccatagccggttttatcaattattttcgcaagaagatcatggattgccgtatacggaagaatttctctgaaacgatccaatacctcgaaaaactccctcaatttttcctgtacctgtattgcctgctttttgtccacagtttccggaatttcttccagactcagactgaaaaatccttctactgcctcgtaaaacaactgattcggatacgcaagacgaatcacggacagctctgctgccgtcagaccggcaaacggtgaagtcaaaactgctgtcaatggcagatcctgtcttgcattatcaagaactttcagataatccagaagaacactgacctcatatgtctcgaaatatccttctctgctcacagaatatgccggaattccctcctcggccagtatggacgcgaaaacttctgcccacccctgtaaacttcttgtcagaatcaccatatcccgataatgaaccgggcggtattctccattctccttatcaagcacaacccccgtgtttagaagttctttcattctctgtgcgatcatccgcgcctcttcttctctcgcttcactgctccgaagtcccgtctgattataaagaagcagttccgtctgatccgtaaacacattttcatccggtaattcaggaaaagaggctcccaaatgtagtgccgccttatcatcatagataatttctccgaattccttccgcatcagtttcctgaaaatataatttgtactgtcaagcacttctcctctgcttcggaagttcctgtcaagatcaattctctgcctgctgctctcctgcgtactgtagctgttatattttcccataaagagttccgggcgtgacaagcggaatcggtaaatactctgttttacatctccaaccataaaaagattattctgtcctgccgactctcttgacacactcgtcagaattgtttcctgcaccaggttactatcctgatactcatcaatcataacttcttcaaagcgttcctgatactcctgtgccactgctgacggaaccaattttccttccttttcttccgtcagaatccgaagtgcaaactgttccatatcactgaagtccaacagatttctctgtctctttttctctgaaaatacctctgcaaaagcctgtaccagcagaactaacatcttcattgctgtctgtgcctcttgcatatccctgatccactcatcaacaggcgcgtaaaaatagtttgctttcagatcttctatcagtttcttggcctgttttctaagcccctgcgctttctctttcagctccggatcgactgtcggatctttctttcctgacaaacgtttccatgtaaaatcactgacgatctgctcttgctgacaaaatgtctctgctttttccaattgctcaatctgtaccagatcagaatctaacatttcaccatacatatacggaccggccggaagttcgcatacttctatcgcctgttgaacaaaccctttcacatctgtgagattctgccttactcttgcctttgcctcctgcacgacatctgcttcttccatcttctccggattgatctcataattatccacacattccttcaaccacttttccggctgtggataacttctggaatattcgtaaagctggaggataagttcctcgatcttctgatcatttcttcctgttccatactggtcaacaaagtttaaaaatgcctcggatccctctgcatagaaattctcgatcagctcttctaagacatcctgcatcagaagacgcaattctccttcttctgcaatgcgaaaagccggatcaattccaatcacatgaaaatgatcccggatcaccgacaggcagaaactgtggattgtcatgatcgacgcattgtggatcaatgtggactgctgctccagattcacatttcccggctgctcttccagcttcttttcaattgctgcaccgattcgttctttcatctctgccgccgctgcttccgtataagtcacaaccaggagacggtctacatccgcgggatcattttcatctgttatcctggaaataatccgttcaacaagtaccgctgtctttccggaacctgctgctgcagatacgagaatgttgcggtcacgcaagtcgattactttctgttgttcttctgtccattttacgctcattctcctgcctcccctttctcttccaaaataccaagacgctctttcatagaattcaacgcttcttccaaggtatattttcttaatcttctgtactcacagccttcaatcctctggtcaaatccgcagatatccctgcacccacagtaatcacagcctgtcatctcatcaagtacatacggaagtgccgcaacctctccctgatacatcacgtccttcagctctttttctttctctttcgtgtacgcaagaaccgtatcaaaattctcctttgataaagcttttgatgccgaaccgagcgttctgttcttattcatccgcagcggatagaatgttgaagttccactcagattccgctccagatgctcaactacattttcatctgcattgatcagtccatccagcttcagctcttttagaatactttgctcaacttccgcttttgtctcttctttcttcacaatcggatcctggatcctgtaataaaaaataccggccggaagtacttctttctccggatgtttctgccgttcgatctccagtgccgcattcagataaaccggaagctgcatctgcaaaccgtgatagaatgctgtgatatcaaatgctttccttccagttttataatctgttactttcacataaaccgcattttcgtcttcgcatgtatcaattctgtcaatctttccgcttccaaacttaaattcacacccgctcggcacaaaatcgcctgccgccatctgctgtgtcagtgcccagacggaccggttgatcaattgcttgattctgtggatcatatactcattacgtgcagatgaaaatagaactgtatttccataatctagaatactttcttctacactttcatcaatcagctgctcccgcttctcttccggcattgtaacccagtccagcccttcctcttctaccttgtgtgcaaatcgctccagtgcctgatgtgcaatatttcccagatccattgcttcgaacccatacttctcccgttctgacagacggagtccgtaattcaggaaatgtgcatatgcacaggaagcaaaacgttccagtcttgttacgctgacacgctttggatccaggaagagttcttttgctactctacttccaaggctcggctcatccttccggtagaaaccggcttctatcatctgcttcagagtttcctgactctgttcatcctttacaaaccatctgtacagttctttccaggaatcatccagtccatgctccctctctcttaaaccttctgcaatctgcaagagtccgctctttctcatcatctcatgatcaagcagtccctttctgtcttcctctaccggaacaagtaccgggaacagacgcatcagatcctggatcagatacgctggacgaagtgcttttccttccccggatacttttgcccaggacagatacagaagttctgacggtttcgtcagattcatatagagataaaatttctgaatatataatttctcttttggtccgggagaaagattcattttcttctcctgaaactgttttctgtctcgctcggaaagcagacctcttgcccctgcatttcctggaagaagcgtatcatttgctccgacaaaaaataatgcacggatatttttgatacgtgttctctccatatctccgatcacaacctgatccagacttggagggatcacacctactttcgcctcttcaagtcctgcatctaaaagttcacagtattccttcaaaggaatctcttcctcccccagaagttcaacgaatttatcgaataattccagaacaatacgataaatctgtgcatattccttcgccagtgccagttctccatcttcctggaatttctgctccaattctgcaagctgctcctggatcttctcctgaaccagatattcataaactgcaagtgtgatctcttttaccgtcttttttctcttcttcaggactgtatgcagcggtgtcagtttttccacaaagcgcatgcgcagatggttcagttcttccagttcttcctttgtcgtcatcggtgtctttctcacccagacctgatcccatttcttgaatcctttcagatccagcgcaagacagtaattttccagacggtctacttcatctcttgtgaacccacacaggctggtccgcagataacgaaaaacgctttcgtaagtatagttctgttctaccatcaccagcaagcttcttaaatactctacaaaagaatttaataaaatacttttcttatgatccataaagaccgggatttcatatcgatcacatgctttttccaaagcatctgcataagtactcagatccgaagcaatcactgcgatttcccgatatctgtacccttcttctctcaccagacgccggatctcctctgccacatactgtgcctcttcctgtggtgtatgaacttcatgaagagaaattgaccgcatcttctctccactgtattttcttctggaataacgaaatagttcctcttccaaaaacgccatctccggattctctttgaatcgatacgacggattcttgcataaccagaccgggtcatcaatctccactctcacttcctgcgccacttccgtcagtgaagtaaccatctgcttactcaacgcaaagagctgatacggatgcttatagacaaacggatcttccctccggtcgatctcaactgtcaacataatcttatcgcacactttcagaagttccccgatcagccggttctgcaccggtgtaaatccggtaaatccatccattgcgatcacactgtttttaagcatttttgcttccggtacagtctgactcaacacatcaagtaattcttcttttgtgatatatttatcacgcagataatcctcaaatccttcatatactttacggatatcctttaacttataatacagataactttccggattcagtccttccatgaaagaatcaagctgttcaaaatcaattccatactgtgtgaattctgatatcacagacttcacttcgctgatatatccctgcttcttaagatttcccttaagaacggtcagctcatcttcgtaatttcctgcaatcttacggagcaccagattcttaccctcatcatcaaggatcggctgtctttcctttcctgtctcttcaaaaacacggtgagccagacgtccaaaacttaagacatcaatattcataataccgccacgcggatgtgccatacacaggtccttctgcgtctgcattgtaaactgctccggaaccagaacaagataattcttctccggatgacggattgactcctcaacaatctgctgatataaataatgggactttccgcttccggaattcccgaaaataaactgcaatgacatgctctgactcccgcctttcttcttaatatctaagcaaaagacaggctgtcgttcacaggaatgagccatatctctcagccttctctgtgcccggcagcccgtctgggtttttcctttcttctattatcgcaaatttatttcacaaggtcaaccagtgctgtcttaggaatcgcaccaatctgtcttccgctctcttcaccacctttaaatgcgatgaaagtcggaatgctcatcactctgtatttctgtgcaatgtcgatattctcatcaatgttgatgtggcatacctttacatcactgagttcttctgaaagagcttctacgattggagccatcatcttacatggtccacaccagtctgcataaaaatcaacgagtaccggctgctgtgcctgaagtacttcctgctcaaaattgtctgttgtaagttttactactgccatctttatatcctccttatagatgttatatcttttatctgtaactgaacagttacctttttcctttgttacaaccttagtatagcacatattttttatttttctgtgataaaatcacaaagaaaccgacagtttggatttttcctccctgccggtttccttcattacttcttatatcgttttatcttattgcaaccaggtctgcaaccctttatttacgcttcatcgattgccttaccgatatcatgtctcatgtatttattcttaaagtttacccactctgttgctgcatatgcattcgcacgagcttctttcagatcttttcccttcgctgtcacgccaagaacacgtccgccgtttgtcacaatctgatcttcgttgaattttgttcctgcatggaagcagtaatatccttcgtgcttcttgaactcttccagtcctgtgattgggaagcctttctcgtagcttaccggatatccttcggatgcgagtacgacacagactgctgcattgtcttcaaactgaagatcaacctgatccagtgttccgtcgatacatgcttccataacttcaaggatatcattcttcatacgaggaagtacaacctgagcttccggatctccgaaacgagcgttgtattcaagaaccttcggtccgtcttctgtcagcatcaatccaaagaagataactcccttgaacggacgtccttctgctgccattgcgtctaccgttgcctggtaaacatatttctcacagaattcttctacttcttttgtatagaacgggcttggagaaaatgttcccataccgcctgtattaagtcctgtatctccgtctccggcacgcttatgatcctgcgcacttgtcattgtcttgattgtctttccatcaacaaaagaaagtacggaaacctcgcggcctgtcataaattcctcaatgaccatctcatttccggctgtaccaaacttcttatccagcatgatctctttcacgcctgcttttgcttcttccagatccttacagatcagaacaccttttccgagtgcaagtccgtctgctttcaaaacaatcgggaacttcgctgtctcaagataagcaactgctgcttttggatctgtaaagttttcataagctgctgtcggaatattatatttcttcatcaggtctttggaaaatgctttagatccctcaagaatagctgcattcttcttcggtccaaatgtgcggattcctgcttcttcaagaacatctacaagaccacctaccagcggatcatccattcctacgatacaaagatcaatcgcattctcttttgcgaaatctcttaatttatcaaattccatagcgccgatcggtacacactgcgcatactcagcgattccggcatttcccggagcacaaaagattttgtctgctcttgggctctttgccacgcttgctgcgattgcatgctctcttccgccgcttcctacgatcaatacgttcatagtctctgcctccttactcggtaacgattgtacgatgtccttctacttcaacctttccgttcgcgatcagatcgattgcatgtggaaggatcttccattcagcctgttccatcactctgcgctgaagcacttccggggtatctccattgtgtacttctacagccttctgcaagatgatcgggcctgtatcagttccttcatctacgaaatgtactgttgcaccaactactttcacaccgcgctccaaagctgcctcgtgcactttcaatccataataacctgttccacagaaagatggaatcagagatggatgaatgttgatgatccggttcttatacttcttgatcatctccggcgggattaccacaaggtaacctgccagcacgatcagatccggttcatatgcatccacagcctttaaaagttcctgattgaacacttctcttgactcgtagtcctttggagaaatgcatttcgcatcgattccattttctttggcacgtgtcagtgcataggcattcttattattgctgatcacgcccacaagttctgtgttcgtgatcattccattctttacgctgtcgatgattgcctgaaggtttgttccgcctcctgacaccatacttaagactcttaacataaagtcactcccttttcgccagcctcgatcttgccgactacatatggctgatctcctgcttcacgaattgcatccattgtcttatcaacgtctgccggatcaacagcgagaaccattccaagtcccatgttgaatgtgttgtacatcatctgctcttcgatttcgccctcttttgcaagttttgcaaagattggtggaatcgggtagctgtctttttctacaactgcatgagttccttctttgagcatacgcggaatgttctcatagaatccgccacctgtgatatggctgcatgcttttactgtaacacctgcatttttgatgcttttaagtgcttttacatagattcttgtcggagcaagaagtgcctctccaagagtagttccaagatcatcataataagtatctaaagattcttttgtaatatcaaatacttttcttacaagtgaaaatccattgctgtgaacacctgtagaagccattccgatcagaacatctccggctgcaagattctctcctgtgatcatatctttcttatcgcaaacaccaactgcgaatcctgcaagatcataatcatcttccggcataagccccggatgctctgctgtctctccaccgatcagagctgcatcagactgcttacatccttctgcaacaccttttacgatctcagcaatcttctccggatagttctttccacatgcaatgtaatccaggaagaagagtggctctccacctgcacatgcgatatcgttcacgcacatagcaacagcatcgattccgattgtgtcatgcttatccattaccatagcaagttttacctttgttccgcatccgtctgtaccggaaagaagaacaggctcttccatctctttgatcttcgcaagagagaaagctcctgagaatccgccaagtcctccgagaacttctgcgcgcattgtctcttttacatattctttcattaattccactgatttgtaaccggcttcaatatctacacctgatgtcttgtaatccatcgtaaatctccttttctttcgaatcgtaatatttatttattgttgagatattcctcataaccaacttctgcaagtctgtctgcttttgcctgtaccgtatctttcatctctgcagaataagctttcagtttctctaaaagctccggatctgacattgcaagcatctttgctgcaagaattgccgcattcataccgccgtcgattgcaactgtagcaaccgggattccaggtggcatctgaacgattgaataaagtgcgtccataccctccagattctttcctgacattgggataccaattaccggcattgggaaaagtgctgcgcacattcccggcagatgtgctgccatacctgctcctgcaataattactttgattccctttccttcagctgcctttgcccagtcaaaaaagacatccggcatacggtgtgctgaaatgatcgtcatctcataatcgattccaaacttctccagtgtggctgctgccttactcatcaccttcagatctgagtcgctgcccatgacaattcctacttttggcatatcatttcctcctcagtggtatactgttttcctttccttggaaaactttgtttatttattatccatacttatgaaagattccatttaatcatctattaactatccaattacctataggatttccttaaaatcccgcttcatccaaaggctcattaagtacctctgttcccggcaatacgaatcttccgttctctaatagtataatgtcttttctctcgtttgtcactacacttatttcttctaactctttataaggcacggttatatctgtatgacagttaaagtatgcttttgatacgtcttccttacgaagaagagaacaggaattatctttcgccacaatttcctttccgttcggattgtagactctgatttcctcgctccaggaatagcatgtatctcctactgcaaaatgcggtcctgttttctctgcgatcagaatcggcatcttatcttctatattaaatttcttcgctgccacatatgcagttgtatttgttccaattgcgaactcaccaagcggaagagtctcatgatttttcagaacattgtcataaatatattttttgttctgcttttcatcctcaaaatttgtacatgtataatctgtaatccttccgtccttgaacgtcagtttcagattctgatactgaagaccatctaaatagaccttactcacatgaagtatgccgttcgtcccttccagaaccggtgaagtgaatacttctccgacaggaatattcacgtctgccacacaattttcgaagattgtctccttctgtgcgtccttcagaggatatagttgtactgtaatatctgtctggttttctccttttcctttgacatgtacacaagtcccttgatccagcgcatcgatcatcgtctgctgcactttttcataaagcttcgcatctaatgtattgatcttgatcacttcatcaaagatctttgcataatctgctccaatctccggtaccggataagcaacaattgtaaaacttctctcttcacccttgatatactcattcgtgatctgtcctgatttgctgctaaagagaagatccagttctctctgcgcctcgtcatatgacggtgctgtctctttcgcttccggtgaaaatggtgtctcaccgaagatttccataaccgccggtcctgcaacacctgctgccatctctttgttctgctcgaaaacagtcttcatcacctcaagcttacgttccacatatcgcttatccatgaagagtgcctgatcctgtctgtgatcatactcatactgctgatttgcgattgcaccataatatccgatcttgtgatgctctcgcttcgtgatcacactggatgctgcacggtaaatgacaggctttaatcccatcttacggaagttctcgattgcaaggcagatcaccttctcaaatccaaggctgtaacggatatttacaatcgatttctttgacagatcttttccggtattaataaaaccaacccgatatccttccgtatatacatctgccatcttctgcagtgtctcctgtggcagatttctcagatgatgagctgttccaagttcattcttggaaatgtactcaccgaattcatacagatagtcatctttatcaaggtctgccttctcaatgatctgtacagcaaaatccgctgacggatccatctgctccagaattcgatctgcataaaatacatcgcagtaatcgcttgcataccaatacagaatctccttgatctgctccggctttggaaccggattctcttcctcactcattccttcgaaacaggtatagacttcgagaaacaactcataaaggatcgtcagataatccttgcgctgttcaaacacatacggaattcctgctctgatttccgtatacaacaaacttaaaagctgtcccatctcctgcccaaatttttcacaggcatagtcttgattgacatagcttgtctgatatttctcccctataatatcactataaagaatcctgttcaggctgcgcttctcctcaagatttaagctgtcccagattccatcttctatctttctttgtgtattctctaactcaagcagaaacaaggtacaatcctgaaagtaagaaatatatgctgcatccactgtttcttctgtcacgatcgtgcgcagacgctcaactgccagttcgtgacgctgtgtgcactgttcatttttctccttctgtaactcacttaactttccgatcataaactcagacctccaacaaaaattccaaggaagcacaagatctgcacaataccgatcccgattccacatttgcaggaaaggtattttctatcctgctcctcaaatccttctattgcattccagattccatatatatcaatcattaaagaaaggattgcaatccctccgacaattccggctgcctttcctctcgtcaggaacgcatatccgacacatcccagcaagatagcaagtgaccatccggtcaaccagcaggagatcacacctcttcttgactgcagataagctgctttcccatatttctttgattgattacgctttcgttctttttcttttttttcgttcatttcttctccttagtagattacaaactacaaaaactatatatccaagtacaccgccgattgtattcagcagaatatcgtccacatcaaagcatcccactttcgtgatcagctgcattaactctacacaaaaagtcagacaaaaactccaaaataacgttttaaaaaagcttcttcttttccctgccattgcagaaaaataaccaaccggcatgaaaataagaatatttccgattaaattcgagaaaaccgcaaatgttcccagctgatgtctgtatttaataaatcgcttaatctctttgaatagctccagattgtaatggtactcatccattacgccttccctgccgtaccagtctgacaagaacagaaagtatacaaggaagataatatataatataaacaggatctttccaagcgtcctgactctcttcgcttctttttttgtcaatttcttacacctttacagaaaaagaaagtcccctctgccggtcacttcggacgtaactactcacaatgaacaagctacgaggggactttccttttaaaatgttatattatttttatgttttaacagactggctccattgataatagaaataattcctaccgtaactcctgtaacaagcaggataattccaattgcaatgttacctgctccgctgtttctcattacacgatacgctttttccaaaacaccaggcctccttattttgctccatatttctcataatatgcatcgatcgctgcttttaatccatcatcgatcactacttttccgtcacattccttgttgtaaaggcactctacaacatcttccattgtaacgatcgctgctgtctcaaatccatagagatctttcacttcgtcaagcgcgcacttctctccgccttttcctacttccatacggtttaaggataccataagtccaacgattgtaacatcagcagcgccttttaccttcggaactgtctcttccatagatttaccggatgttgtaacatcctcgatcatgatcacgcggtctccatctttcagcttacttccaaggaaacttcctttatctgcgccgtgatctttctcttccttacggtctgagcagtaacgtacttcttttccatataattcactgtatgcgattgctgttacaactccgagtgggattcctttgtaagccggtccaaacagtacatcaaagtcatctccatatgtctcatgaattgctcttgcgtaatactctccaagtttctttaattgggatcctgttacatatgctcctgcattcatgaaaaacggggattttcttccgcttttcagtgtgaaatctccaaatttcaatgcggcacagtctaccataaattcaataaattctttcttataactttccattctatcttacctccaggtttattttacaataccaaccatatcttttacattctcaaagccgttcttcttcatataagcttcgattccgtcaatcacttccagtgtcactgccggattgtggaagtttgctgttcctacagatactgcacttgcacctgcaagaaggaattcaattgcatcttctgcacaggaaattccgcccattccaatgattggaatgttaacagcctgagcaacctgataaaccatgcgaactgcaactggtttcacgatcggtccggatactcctccggtcttattcgctaccgcaaatgtttttctgttgatatcaatcttcattcctgtcagtgtattgattagagataccgcatctgctccacctgcttctgctgctcttgcaatctccgtgatatctgttacattcggtgtcagcttcataatgatcggctgctttgcgatcttcttgatctgcgctgtcagcttttctacattatgtgcatcctggccaaatgcaagaaatcctgcattgacgtttggacaggaaatattgatctccatcatatcgatcggttcgtctgcgagacgctctacgactgcaagatactcttccggagcgtgtccgcatacatttacgatgatttttgtatcaaaattcttcagatatggaatgtctctctcacaaaacagatcgattccagggttctgaagtccgatggcattcatcataccgccataaacctcagctacacgcggagtcgggttgcctgcccacggtacattcgccacacctttcgttgtcactgctccaagacggttcaggtctacaaattctgaaaattcttctcctgagccaaatgttcccgatgcaactgttacaggatttttccattctactccggcaatctttacgctcatgttcattagatttccacctccgtagacaagaatacaggaccatccttacagatacgcttgttatttacattgctgtgcgcgtctttctctttggacttgcatacacatgccagacaggcaccgattccgcatgccattctctcttccagtgagatataacactcgattccattctcttctgcgtactgtttgatcgcacggagcatcggagtcggtccacaggcatagatcatatctgcttccagagcattttcacggattgcgtccataacatttccctttgttccgacacttccatcttctgtggaaatataaagttctccgttctgctcgaactcttccttaaggaatgtctgtgcgtcgcggtatcctactacgatctgtttcttctcgcagtccatctgtttcgccagttcaaggatcggcggtacaccgattcctccgcccatcagaaatactttctttccttcagccttctcgtatgggaatccatttccaagaggtccgatcaccggaatgatatctcctgctttcagcttagaaaattcttctgttcctgtctttggtcctgtcacacggtaaacaacacggagtcttccgttctctttatcaatctcacagatactaatcggacgcggaagcagcttgcttccgtctgtagtatacatggagataaactgtcccggctttgcgtcctttgctgcctctgtattgatccacatgctgtagattccatccgccagctgctcctgggaatgtactactgcattttctttctgctttgccataaacttatgcaattcctttcttgaaattatgagaaacacgatctgcggatttctcaatttctatggtaaattattttgccgctgcaagtgctccgctgatatcagctaccattgcttcaactgctgctcttgatgcatcaccgaaattctccggtccgaacttcgcataagcttcctgcttgtaagctgcaataattccacgagaagagtttacgatcgcaccaagtccgtcttcgttaaagaaatgaacaaggtcttttccctgtccgccctgtgcaccgtatcccggtacaaggatgtaagacttcggcatgatctctcttaatactttacccatctccggataagtagctcctacaacagctccgatatagctgtactcatctcccatgcagtcagctccccactcggcaaccttctcacctacccactcataaagcggtcttccatcaatgattctgtcctggaactctccactggacggattggatgtcttaacaaggatgaacagacctttcttctcttccttgcatacgtcaacaaatggattcactccgtcagatccaaggtacggattcactgttgcaaagtcctctccgaatggtgtatattccttgcttccaaccttgatctttccaagatgtgctgttgcataagcagcagatgtagaaccgatatctccacgctttacatctccgatgatcacaaggtctttagacttacagtaatctactgtcttcttaaatgccatcagtcccggaattccgaactgctcgtacattgcgatctgtggttttactgccggaatcagatcataagtcttgtcaacgatctccttattgaactgccatactgcctctgctgctccttccagagtctcaccatactctgcataagccttatcaagtacgtgctgtgggatgtagttcagcattggatcgagtccaactacgatcggtgcacctgtctttttgatcttctctaccagtttattaatcattcttcattcctccatatcctgttacttttcatcggatcaccgatgaatgataaccttcggtctttccttcaggttgacgcgttacttttctttacgcacaatatgatgtaagtgtcaaaagtataaattgcgtttgtgctcgcacaaataagcaatttatacttattgacacgccgaacaccgaaaacggaataaaatggtgtgaacacgccattttatgggagtttgaggtgttcgaggattgcgggaattgcatagcaatggagcaatccggttacatcagtgagtggcaaaatttacttttgacacttacatcacaatatatcatttttcataataccatattcttgagaattttcctagtcatgctttttaataaatcaaaaaatgaaaaatgaagttctttctctgtcactcatttaaacagaatctgaaagaacttcgtttctctggttttattttttaatatcccgccggcacaagcaatgtaaatggataaatcggaatatttctcacgattccgaaccccaccactataactaataccacatataggactttctgattaatcttctgatccacatgattaccaccggtcaaaacccagtcaatcaatcgtgctacaatatacatcccaagaaacgggagtaatgtcacatacatcggattataccggaatgccatataaaatcttccatgtaaaatagaatagcttgcccgcccggcaccgcaccccggacaatacagtccggtaataatatgaaagaggcagggcagcggatactggtgcggattatgaaaaaagagataacccgcagcggccactgcaatcactgcccccgtcagaactgcgatgatcctggctgacctttttgtttgaaatgcttcacgcatctttctcttccaaatcatcatccgctcactttttaataatagtaataagccgaaccggaaactgcccctgtcacgatcagaaccatgtagatcaaccatgtaagaagaccaattgcaaaggatacgataatccagattcttgccatcttcgcattattctgtgcttcttcaagatttcctgccagcatagcactattgatcttcgccgagaacacgattcccactacaccaaatggaaggcagcaacataacgttgaaataatcgataatataagatacggaacccagttcactggcttctgtggcattccattgaaattattctgctgataatatccctggttttgctgaccatagtttggagcttgctgagtataattctgattctgctggttataattctgattttgctgaccatacccctgtccatactcatagttgtttggttcaccataggaagtattctgctcctgattcacacttttgtatggatcgttctgatatgaaccttccacatcctctggctgtgttggttctgtcggctgcacatcttcttctggctgcactttttctgccgacagcacctcttcttctgactgcactttttctgccggctgcacctcttcttctgactgcactttttctgccggctgctgtacctctgctgtatcttctgttatgttatctgttgtctcttccttcacctgtgatacaggttccatcttctgtaccggctgcttcgccccgcaattcgggcagaacttacaactatccggtatctcctgataacagttcatacatctcattttctctacctcgctttcgtaagtcacaattttcactttcccagagcactgaccaatttgctcacttgttcgttttgcgactttatttcttatatcataacattaatatcaccaaaaaacttgtatcttcattaaaaattaacacttttcttttcccaaacggatttcttccatctgttttgcagtttcctcatcaagataatccagaagataatttttcagatttacctgcctgcccagatgctctcctctgagttcttttaatgccaactcaacctcttctttcagacctggcgcagacattctttgagccccctgtcccatgatgatcacctgttcaagtccatctgatgtggctactgttacatctgcattcttcgcaatcctgcggactgtcttctcaatatattgatctgctgtttctgcttctttcgtatagacaatataaatgttatgatatttcagcacttcacccggattcccctctactttataagcatcatacacaaggatcagggtacatttgcggaatccctgatagttacttagaatatctgcaagctttcctcttgctgcaccaatatctctttctgaaagttctttcagttcttcccatgaaaaaattatattataaccatctaccagaaggtattcttctgttccggctttcgctctccggcgcgcttcccacttcggatcctggtaagcgcttcccggctctcttgtcttttcctttgcccggacagttacaggacctgtagaacgatccttcttcggatccggtgtacggacatagatcgcatccaactcttcctgtgtcagttcaatactggagtgcctgcgttttggaagtgtcacctccattatatccatttcatcatcatttcctgattccaatgtatgttccatatgcatatattcttcaacttcatcccaatccacaacaaatcctgctccatgtgcacagaatacagaacctgtcggattcgccagatctgcctccgaatcataggttgacgcttccagaacttcttcctgattatgacagatatcataacctttcaacgaaactgccattcttccacatccacctgtataggcagtgaattctttctgatatccacgcatcagggacaccggtgcacttcctgtcagcactgttgtctcttcttctatcatcggtgttccgaatttgccggacatattttggatatccgtcatagcccgtcctacattttctgatggaagttccattcggaattcataatatggctccagaagaatactgtctgctttctttaatccctgacgcactgcacgataagttgcctgacgaaaatctccgccttccgtatgtttctgatgtgcacgtccggaagtcagcgtaatcttcatatccgtgattggtgaacctgtcagcacacctttgtgttccttctcttccagatgtgtcagaacaagccgctgccagtttctgtccagaatatcttcactgcactctgctgcaaactgcattccggatccacgttctcccggttccagacgcagatgcacttctgcataatgacgtaatggttcaaagtgtcccacaccttctaccggtgctgtgattgtctctttgtaaacaatactcccttcaccgaattctaccagcacaccaaaacgttcctttatcatccgctgtaaaatctcaatctgcacatctcccatcagctgtacatgaatctcagaagtctgttcttcccatacaatatgaagttctggttcttcttcctctaaaatctttaggttcaaaagcatcttatgtacatcacagtcatccggaagaaggatctggtatgtcaacaccggctctaataccggtaaatccgactcttcttctgctccgattccctgcccgggtcttgtattttccaatcctgtcactgcacatactcttccggcttctacttcctggacagcctcaaatttctcaccggagtagatccggatctgattgatcttttcattcagtccttccactacatcttttactttcagtcttccacctgtcactttcagataggtcagacggtttccctgattatcccttgcaatcttataaacctttgccccaaactctgccggataagtcttatcttttatatacagatcaagtccatccaaaagttcttccacgccttgagaatgtagtgccgaaccaaaataacatggaaacacctgacggtctgcaactgctttttgtactttatccagagagattcttccctcttccagatattcttccatcatatcatcttcacagacagccagctcttccagcacctcttccactgcgctctctttcgtatgtaaatatacttttccacccggacagtcggattctgtcatgatatccacaaatggaacgacattttccccaaaacgcttgcggagttctttcagaagtttttcaccatccgttccttcctgatccattttattcacaaaaagaaaggtcggaatgtgatacctttttaataacttccataatgtctgtgtatgtccctgcacaccatctgctccactgacaacaagcaccgcgcaatccagaacctgcagaacgcgttccatctccgcagaaaagtccacatgtcccggtgtatcaagaagtgtgatcgtgcgatccttccaccggaatactgcctgcttggaaaaaatagtgatcccacgttctctttccatctgatctgtatctagaaacgcatctttatgatccactctgccaagcttcctgattgctccggcatgatagagcatgctttctgacaatgttgtctttccggcatccacatgcgctacaatacctatatttatatatctgtctggcttattttctgagttattccccataaaatctgcccctttcattgttttctcgtttttcaattataccataggaaagaaaaggagtcgactgctcttctttacagccaactcctgcttttctttctctgttattttctaattattcactgaatgatgcacgaccagactgtccctgtcaattgccttgaaagaataccctagattcttataatattccatcactgtcggaagtgcctgaatggtagactccttcgcctctgtgtcatggaacaggagcattactttggtatactcatccgtctctgactgtgcgatgatctgatctgccgtaatcgttcctccatctccactgctcacattccagtcataatactggtatcccttatccaacacctgttgtgtcaactgtgtcataatgcctgccgagtatttttttgaaatagaattcgatgcgcctcccggaaaacggataaagcatggaacaaatccaagctgttcctttgccacctctcctattttctcaagatcatcaaaataagcatccacagatgcatagacctgatcatattcatgcgtatagctgtgaagtccaactgtatgtccctcatcataaactttcttgatcatagggaaataatccggctgttgggcagtaatgaaaaaggtagctttcgcatcatactgatccagaatatcaagcacacgctgcgtatttgcagacggaccatcatcaaatgtcagataaacgactttctcatcatcctgcggatccatggttccaactgcaactcccggctgaagagacatggacttatctctttctgcctttgctgcctcttctgcttttttcgcctcttcttcggcttttttcttctcttgtgcttctttctctttctgtatttctacctgacgtaaagctgctgcttcccgcgcattcgccaccatacatacacctgttccgacaatcgcaaaaaacacaagacctaccagtatgttgaaataaatattgttctcctgacgcattcttttataactatgccagacactcaccagtacatcttttatctttatcaacatttcctttatcttttgctgcattctctctcccaatccctctgcgttactgtaaacaacgctcttttttttacggatattactgacatcactatttccagcatctttcgcatacaatatccgtataattatatatattataaaccatacttcttaaatatgtagtaatgattcattaagaattattcgaaaaatgttacatttctgttactcactatcctgcactactgttcacactacatgagaccagcaatgcatccccatccatccgtatttgaccattttctttacaagtgttaaaataactttacagataagcaatcaccgcattcgtatgctctgccacagaacacagaaaggagaatatccgcaatggaagataagcgtatcaccaaaacaaaacgtgctttaaagtctgctcttttggagcttttaaccacacaggcttttgatgtaatttcaatcacggaattatgtaagattgccaatgtcagccggatcactttctacacacattataaagataaatttgccctccttgacgacattttcaatgatatgctgattattggaaaagaaggataccatcgcagacaggaggaaaacaatcctgaaaacaatctcacacagggatatctgaacgttttggacagtattttgactctttactatgaacgttatgattttttccggcatgtcgtaccggagacaaatccttacctggcttttcgattttatcggatccttttagacacggtagaatctcatacagataagctgaaagcttcttattctttaaaatattctgcaagacagattgccggattcatctgctttggtctgttcggatttatcagtgagtcttatacatcaaaagtaccattagaacaggttcaggccggagcaagacaacttttaacagatcttctgcaatccaaaattcttgtataatattttgcatttgtaactgttcagagccaagcaaaatttcaaaaaaagatgtaaaatgcttgcatttttagattttaacatgaaaaagaacatgcaccacagtttcaagacttcttaaacaaaagcttttattctctggtcatgttcttttttatttttaatagttacgcctctttttctttgtaatgatgcgcctcttcgagcatcatatctttcactttcatcagtcggatctgtgtactacgctcattctcatccagtttcatcgtaatgtatttgatactttcctctgtctctggaatgataacatgctccagtgcatttacacgacgtcttgtcttctcaatctctgccgccatcagctgacatgctttttcacattctgcaagtcggatcatatctgggaggatatctgataaagacttcactgctccatcaagatcactggaagtaaatgcaaatccataagaatagatatcattttcatccgctgttcttgttttggatgtgaaggtcggaatctcaacactcataacattcttctcatcaactataagtccaacttcctgcttcggagccatcaatgcagtattcagtgctgcctctgacattccggcccgggcaataacaaaattacggttcgcagagagaattccttcttctactcgaagtctcacttccatattttctcggacaagatccagatactggcgcatcagctcatcacgcttatctttcaaaagcttgtgaccacgaatggctgtaatccgctttttcttcaaacgggttagttccatacgggttggattcacttgtttcgcagccaataccgccacctcctctttctatcttcgattattctgtctgttcttactctttgtcgtaatattcatccagatatttatcgtcaattcgtttgagttcggtacgcggcagcatgcgaagcagtttccagccgatattcaatgtttcctcaatgcttcggtctgtctgatatccctgagatacatattctttctcaaatgcatctgcgaaacgtgcatatttcaggtcaatttctgtcagtgctgcttctcctaagataaccatcagctcttttgcatctttaccacgcgcataagcggcaaacaactgattcattgtattggcatgatctgctcttgtcttacctgctccgattcctttatctttcagacgggacagagatggaagaacatcaattggaggtgttactccttttctgtaaagctcacggcttaagatgatctgtccttccgtgatatatcctgtcaggtcagggattggatgagtcttgtcatcctcaggcattgtcaggatcgggatcattgtgatacttcccttcttgccattctgacgccctgctctttcatacagtgttgcaaggtctgtgtacagatatcccggatatccacgacgtccagggacttcctttctggctgcggatacctcacgcaatgcatctgcgtagtttgtgatatctgtcagaataacaaggacatgcatatccttttcaaatgcaagatactccgctgctgtcagcgccatacgtggtgttgcgatacgctcgattgccgggtcattcgcaaggtttacaaacaatactgttctgtcgagtgctcctgtctcacggaagctttcgataaagaagttagactcctcgaaagtaatacccatagcagcaaatacaaccgcaaagttttcatttgttccaagtacctttgcctgacgggcaatctgtgctgccagctgtgcatgcggcagaccggatgctgagaagattggaagcttctgtccacgaaccagtgtattcagtccgtcgatcgcagacactcctgtctggataaactcctccgggtagcatctggccgccggattcatcggaagaccattgatatccattctggcatccggaagaatctgcggaccttcatcgattggattaccaagtccatcaaagacgcgtccaagcatatcttctgatacgccaagttccatgcttcgtccaagaaatcggactttgctgttggagaggttaatacctgttgaactttcaaacaactgtacaaggacatcgcttccgttcacttccagaactttacatcttctagtctctccgctcgccagctcgatctctccaagctcatcatatgttacgccttctaccccatgcaccagcatcagaggtccggccacttcctgaatggttctatattcttttggcatttaaccttcctcctttacaaatgctgctgcgatctgagcgcttaatgtctcatcaacctgtttaaattcttcgtcaagcttatcttctgtcacatatttaaaacgtccgatctgctctctgaccggcattgagatcagcttctgaagtgatgcaccatcttttaatgcatcggttgctctgtcaaagaattcgttaacgagaaccatcatcatgtgctgtttcttcaatgacgtatacgtatctacttcatggaaagagttctgatgcaggaagtcctcacgaatcgatcttgcagcttccatcttcagacgatcggacggtgaaagtgcgtccatacctaccatcttaacgatctcttccagttctgcttcttcctgaagcagtgtcatcatcttctgacgtccttccatccagtcttcggcaacctgtccgttaaaccatttttccatatcatccagatacagggagtaactcttcaaccagttgattgccgggaaatgtctcttgtatgccagggaagcatccagtccccagaacactttgacgatacgaagtgtagcctgagataccggctcagatgtatcaccacccggaggagatactgctccgataacggaaagtgctccttctcttccttcttttccaagagaaactacatgtccggcacgctcataaaactgagccagacgacttccaagataagccggatatccttcttcaccaggcatctcttccagacgtcctgacatctcacgaagtgcctcagcccaacgggatgttgagtctgccataagtgctacagaatatcccatatcacggaaatactctgctattgtaattcctgtgtaaatggatgcctcacgagctgcaaccggcatatccgatgtatttgcgatcagaacagttctctgcatcaaaggctgtcctgtcttcgggtccttcagttcagggaactcattcagaacgtctgtcatctcatttccacgctctccacatccgatgtagacaacgatatctgcctcagcccattttgcaagctgatgctggattactgtctttccacttccgaaaggtcccggaacggccgcaacaccgcccttggcgattgggaagaatgtgtcgataacacgctgtcctgttacaagtggcatctccggtggaagtttcttcttatacggacgaccgcgacgaaccggccacttctgcatcatagttaattctttttcgcctttttctgtttcaacaactgctacaatatcttctactgtaaatgtaccttctttgatttccttgattgttcctttaattccgtaaggaaccatgatcttctgctgtacaagaactgtttcctgaactgtaccgatcacatctcctgtctctacttcatctccaacctttacattaggaacaaactcccatttcagatttctcttaagagacggaacttcaactcctcttttcaggttgtttccggaaatcttcataatatcatccagtggtctctggattccgtcataaatacttgcgatcagaccaggccctaattctacagacattggaacatccatagattcaaccggttctccaggtccgagacctgatgtctcttcatatacctggatggatgcctcgtcaccgtgcatctcaatgatctctccgatcagacgctgttccgatacgcggacaacgtcaaacatattcgcatcacgcattccctctgcgataacaagaggtcctgcgacttttttaatcactcctgtgctcattcgcttactcctccaaacagaatatctgatccgacggcctgctcaactgtcttcttcacaccttcaactccggctcctgtattccccgacacacccgggatctgaataatcgccggaaatgtctgctcaccgtacttgttgatttctgacggaatctgtgcagccacagcctctgtaatatagataatgccgtaatttccttctgcaagctggcgaagctttgtcttcgcctcatcccggtccttcacagggcagatgctaagaccgagggtggcaaatccatagatactgtcataatcgcccattactgcaatcttatacatacatctcccttatcctttcccggattgcttcatccggaaattcattctgctttccggtcagtataatccgtactgtcttgatctcattttgtctggctaacagatacgccagaagcggtccaacggaaaatgattcatatttctgtgacctcatagaatctgtcattttattatcacaccagcgttcaaatgcagacggtgatatacgcagtgcatcggcaccttcacgataagatgttccttccagatactgtgcgatctcctccgcaccggccaatgctgcctgtgtcagctgatccacattgatttcggaacaatttaccattgcttttttcataaattctgcattttttcctgtcttctgagatcttactgcaatcttaatatcagcgattgcaactgctgtctgtgcatactcttcaatgatcttctcacctgattttttccctgcttccagcatagcttccagtgttgcgtgatcaataataagatcgcacaattgtccgtctcttgtgtgaagcagagtgtcaaatgcttctcttgctgttgctggcatattacccggcagcttatcaaattctttgttctggacaagtgcaaacatctcttctccagaaatctcacagtcatcgtaaaaaatgtttttattctctacttccgtacacacttctttgatcgctgctttcagattgtgataaagttttggaagtgacagaacatcgaatacatgcatatccggtgccacctcacggattgtctgccacatcttctcttcttccttattcagaacttcatctgcatccaacgttcctgctgtcagatctccccagcccttttcaatcagaagctgtagagcctgttctgcactcttgcacgcaagaagctgttcgatcactgcattcgttaaaagagagacttccagtgcacggattctggcaaccgcataggtatattttgtcttactcaagattatccctccttgcggctacactgctgtaaacagctgccggttcactttatctgataactcttctcttcttgcatcaaacaacgctttgatcgtacaattttcttcgatgccgccataggtcaggataaatcccccatccattccgtccggcactgtctctgtaagttccaggcttccgcctttcttcttcgctgtttcatatactttttccatatacccttgaggcatacgttttctgtctttctctgtaaagcagatggttccttcttccggaagtacatacttctcaagaaccttttcaagcattgcaaaataagctgcatcatcaagctctccgactgctttgtaagcatcttcaagaacttcactgatcacttcctgtttcgcctcaagtactgccttgcgctttctcatatctgatgaagaggccaggcgtttcacagaatcttctgctctggcttctgcctgtgcgacaatcttccgtgcatctttctctgcctgtgcttttgcttccccaattatagaatccgcctgtgcgtgtgcctgtgcgagtatctcttttgcattgtcctgcgcctctgcgattatctgcgctttcattttgtcaagtccactcatctccacgctctcctttttatttatttcttacagctggataccacttactgcgaggaaggaaatcagaagagccaggatcgcatatgtctcaaccattgccgggaacagcattgctttaccaaactgctctggcttctttgctacgattccgatagaagccgctgctgtcttaccctgtgcgatacctgaaatcaatccaacaataccgattgggagacaagctgcaaggatcataagtcctgactgaacgctaacttctactccgccaccgccgagaataccaattttagaaagtgtaataaatccaacaagcagtccatacagtccctgtgtacctgggagcagctgcatgataagtactttagcgaatttgctcgggtcttctgttacaacacctgatgctgcctgtcctgcgattcctacacctaacgcagatcctgcacctgcgaataatactgcgattgctgcgcctaataatccatatacaactccaagttcacctgctatattcataatgttgtttcctccttaacatcaacatatttcgtattttctttaaaaggctcgaatgcttttccgccgccttcataaaattttccgaagaattccacaaactgtaaacggtttgtgtgtacataagctcccagcagattgatcgccaggttcaatacgtgtcccacaatgaagatcacaatgaaaagaatcacaccgatcacattgtttggaagcattgctcccatctgattgataactgatgcaataactcctgttgcaagtcccagtgcaagaagtcttgaataggacaatgcgtcactgagccatcctgtcacgttatacaaatcatacgctccaagcgcaagccgaagcgccggattcttgtttgctcttcctgacatcagcacaataccgattgctccacccgcagccatcacttttgcagcagtgttcaaagctgccgggaacacgatcgtagtctgtgcgatcgatgcgaaaatgtcacttggaagcagcatcaggatcaacccaatcagcatcacaaaccaaagtacaacgtcacagataaaatctacaaccttaccatcttttaagcacagataacctttaattccaagtcctacgaacaaatgaattgttccaaataacaaagaataaaccagaagtttcattggatcattcaatggaacaaaccaaagtgccggaactgttaccgtatgtccgaagaatttttctgaaacaatgtctacgatatttccaaaatatcctccaaatagaacgccccatacaagtgtagatactccacagtagaagaacagtttcaaagattttgccatgctctgtgacattcttggatatttcttcacaagaatcgcacacacaattgcaacaactgctccatacgctgcatctgacaacatcattccgaagaaaaatacgtagaagaatgacatgatcgttgtcggatcgatttctccggcatgcggtaatccgtaagattctacaataccttccatgtttgtagagaatgggttattctttaaaataaccggtgcttcttcaccttcttcaatgtcttcaatatctaccatacagttatatttctctgtcaaagatttctctaccggacctgactcacatgccggtatatatccacttatcacaaatgtacgctttgactgaagaagatctccgagaactgcatacttatctgctcggactctgtaataatctgctacggcctgaagttcttttcttttggaagccaggctcttaagttctgcctcgcactgcgtcatccgctctcttgacgctgctatctctgtttccagtacttccttctgctcttttggtgtcttgctccagttctgggacggtcttgcaaatcctgcactccgaagtgcttcttccactgtctggagttgttctttcaaacagatgactgcaatgcagatcatattagattctgctgaaactaaatgtacatcgacccctgttttctccatcacttccggagtcttctcaagtagaatggaataaatgttctcaagagtaagttctcccggcattgttcccaggatcaaagcagtcctttttgtcttcccttcctgaagcggaacatctaatgccatccacggcatcagactttcaatctgattctcaatctttgctatgcctgctctaagctcagcatactcgcgatcaagatcataaattccgcgggctgtcttgatcagttctggtccagatatctgaaccttttcttccaactcgcgatcgatcagttcttttccttccagcgaagaaagtaatgactttttctccggagcgtaagcatccagaatccccagtgcctgatctgctgccgttgccgctttttcaaatttcatccgctgtccggttgtgtccatcttttggaagaatgcatcctcttctttttccctgtcaacttcaagaactccaagatgctgtaactgttccaggattgcttttcgatctttcttcagggcacagatgctgattttctgcatcttaagtaccgccataatcttatccctccttttttgttacgaccacatggatcagattaattcagaaagaactagctgcactgctgcatcctttttctctcttgcagaaaccttcagctcttcgatcacatctttgagcttctctgcttctttatcttcctgatttttcgcctcttctctggctttctcatccagtccaccggcagttctttttgcctcttctataagttcttcatgaatctgctttgcctgaagagatgcatctttcagaatctgttctttttgtttctgcgcttttacaagaatctcttctgcctgctgttctgcttctttaattgaccggattgtctcatccaccatagtatctacaccacctttcttgtctccccctttttattgttcttatgtgattttgaacaataagatctcttcgctgcatgttgttactgcacattaatatctaaggattacgctgttcgcagcacgtatcaatatattattaccatacttttctttcctattctctttctgtttgtaactttcgcacaacgatgttattttaaacatagcatattttgtcgtaataatcaaactttttattagatttttatgaaaattttttagattactaaatatttcatctatttttgtagtttatcaaacgttttttgtgtatttgtataaatatctgattattcttttttaaaaaaggaatagataagaaaatgtccttttacaacttcttatccattcccatgaattactttaaaaacatatttttttcgtgttaacgctgcatcttttttctcaacatcattgcagcatctgcaagaagttgttccatttcactttcagaagctccttcactaatatcgcgccatacttttatatcacgtcctacttctccacccattttaataaatggttccatgactattgccccttgataatcgatttcttttaatgcgtttgtaatttcattccacggcattttcccattttcacatggtggtcttctattactctctcccacatgaaaatgaccaaggcgattaccaactaatttaattgctcctgcaaaactgtcctcttcaatattcatatgatatgtgtccagaagaatcttgcagttcggacttccaacttcatctacgtactttactgcttcttctgctgtattaacaagagatgactcataacgatttacaacttcaactgcaaaagtaattcccttatcttctgcaacttgcataatctctttcactgctgaaatacttctctcccaggtagcacttttatctgtaataccttccataaatgtcttattccacgctgcaatatccactcccgaataagtttttccgcccatttcagacataatttggaaagtatccgttgtaaatttaattccattttttcgaatctcttcatcttctgatgctaaatcttgattcgcagataaaccaactgaaaaagtcaattcaatatcattcgcctttgcggcagctgcaatctcatctctctgaaattttgtcagtgcaagaagaggggccggagctacctctagaatatctaatcctattttctttacctgctcaatccgtttgataaaatccgtattccaatctctgttgaaatatccaaagtgaactcctatcttgttcaatttttctcctcctctttttattaccaatcttcatttttccatattttcagccttttaattcttttttcaactgacgaattgttgtattttcatcaatatatacaacctcaatgcccatcgcatctccccaatcgccaagctgttccgctgtcagatcgtatgtcataactgtgtgatgtgccccacctgtcatcagccatgcttccacacctgtcaagaaatctggttttggtgtccagaatgctgtcgctaccgggagattcggcattggacgttctgttttcttgcatgtgatatcattgatcacaagacggaaatgatctcccatatcaatcaaggatgaggcaattgcatctccttctttcgctgtaaatacaagccttgccggatcttctctgtttccaagtccaagtggatttacacgaatattaatatctccttctgcaattgaaggacagatttctaacatatgtgtctcgagaaccccttcttttcctggaacaagattataggtgtaatcttccatgaaagaagttccctttgcatccttaactccagctgtcatcaatttcacaattcgtaacatcgcagctgttttccagtcaccttctgcagcaaatccataaccttttcccatcagtctctgcattgccagtcctggcagctgttttaatcctccaagttgtccaaaatgagtgaccacagcctgatattttttttcttcaaggaagcgttcaaatccaatctcaattcttgcctgttcttctacatgtctcctaaactcctgtggatctcgtccttccagaagaattccatatttatcatagtattcatctgtcaatatattgatgtcactctgcgacactgcatttaccgcatctgctgcgtctacgattgtataagtatcgacttcccatccaaatttcaactgtgcctcaactttatcaccttcagtatctgctacattaagcatattgtccgcaaaacgtgctacccgtaaatgattgctttctacaagtccaattgccgttatcatccagtctccgatttttttctgcacacgttctgatttccaatgacctacaacaatcttatgctctttcttcattcttgcaagcatataagcaaactctctgtcaccatgagctgactgattgatattgataaagcccatatccagtgtatcgtacggaatctcttcgttaaattgtgtgtgaagatgaagcaatggttttcttaaatctttcaatcccaacatccatgactttgcaggtgagaacatatgcatccaagcaatcacaccagcgcagttttcatcttcatttgctgcattaaaagttttacgaatgttttcatttgtcaggagcgtcggtttcaatacaatttcatatggaaccagtcctgactgattcatctcatctacaatctttctgctgtgttctgtcacaattcgaatttcttcatccccatacagatcaactgaccccggacagaaccagaacttgtaatctcttttttgtaacatcatctatcacctcgatctttacaatcagtctttcttctttgcgattgcctcttttacacgttcagcaatcttttctggagtaaatccaaatctttctcttaaataagcctctgatccaacttctccgaactcgtctcttgttccaattctctctacaactgttggatcattctcaccaaggaattctgcaactgctgcaccaagtccaccgtaaacagaatgattttcggctgtcacaattgctcccgtctcctgtgcacattttaaaacaagtgcttcatccaacggcttaatcgtaaacatatcaactacccgtacatgaattccttcttcctcaagaagttctgctgcctggagggaaattgtcacaagacgcccgcaggctatgatagaagcatcatttccttccctcaggacaattccttttcctatttcgaattctgtatcctcatcataaacagcaatattatctgcaagcggggttctataataataaattcctttcatatcaacagtcttactaatcagcttattaaactgaaccccatccacaatatcaaaaatatgtgcatttggcacggtacgcatcatagcaatatcttcaaatgccatatgtgttccaccccagtatgtctgtttgtatcctggctcacttccaataatgtttaatgtttttcttccataagcacccgaaaggaaaatctggtcaaatgctcttcttgtgataaaagatgcaaaactgtgaataatcggtttcatgcccatcactgacattgcagctgctgttccaaccatatttgcctcagcgataccacagcggattactcgttccggatatttatcgcccagatcccacagacctgctccgaacgcaaacatcaagtccgcatccagataaatcacatcaggatccttttccagcataccaccaagattttctacgaactgatccgtaattgcctttttttcatattcgccattatagattatctttgccattcttctcatcctccttacagactgttcttcactgcttccagttcagccaggcaccgatctgccagttctttatctacaggaatcatgtgattaaatttcattttttcaatacattttactccactgccttttacaccatccagaacgagaactcctggcttatcactctgattttccctgacctgtttgaaggcttcctgaattgcttcgatatcatcaccctttactgttactgcataccaaccaaaagctctaaacttttctgcaatatccagaagagaaatacattcatcaattgttccatcaatctgctttttattccagtcgacaattccgatcaaattgttcaatttatactggtttgcatacattgcagcttcccatatctgaccttcctgaatctcaccatctcccatcagacagtaaattctgtttttcagatttttaatcttcgcagcatgtgcaaatccatttgcaagagagagtccctgtccaagtgatcctgtagatgcatcaattccaggtgttctgattctgtcacaatgacttggaagtcttgtccctccctcgcaaagagtcggcagccagtcaagggggaaatatcctttcaatgcaagcgttgcaaatactgccggacctgcatgtcccttagatacgaccagcatatctctatccagtttcttcggatcagccggatcaatatttttcagttctccattatacaaaacagtaaggacatctgcgatagacagacagcctccgatatgtccgaatgtacgtgcctccaggcattttactgtctcaattctgacatcggttgcaaattttttcagttcatttaccgtcatgttcctatcctccatttctatttctcaattgaatgtaccatttcattaattgcatcaatatagaagtttacatcctgtccgactgtaacactgtcaaatccctgtttcagtcttgtattagcaacattaaagtctgcacaatagataattgtaaatttacctgcatcttttacagctttcagaattctctccagtgctgctttgaattccggtttgtcaaactgtgttgggattcccattgctacagacagatcatatggtcctacaaagattccatcgattccatctacttttgcgatttcttcaatattctcaagacatccctttgtctcacactgtggaatcagaagagtttcacggttacacgttgcaaaataatcattaatgtctcccttggcatgctcaagatatccataacctgctcctcttgcaaatgcaacacctctctgtcctaccgggaaatattttccgtattccacaatctttttaatttcctcaagagaatgtacctgcggaataataagcccacctgccccgatatcgagcattttaagaattgaatttctgttagaatcctttactctgacaagtgccgttgtaccatggagttctgctcctcttaacataagcattacactctctacatcaaaaggtccatgctctgtatcaattaacatataatccagatctgtcaatgcaagagcttcagctacacttgcatttcctgcctcgaaaaatgttcctactgttttctcgccgttcataattttttctcttaataaattcttcatatacttacctctttcttttcttcccggatcttatatagcaggctgacccgggaatatctattttaggaaaattggaaatgacctattacttatacaagtccaagttcttttttatttacgatgtttgccggattctttccattcagcacatctgttgctgtctgtgcaagcacttccatcatctgctgttctgcttcaactgaattatatgctgcatgtggagaacagataattcttccagtttcaaataaaggatgatttgctactgtaattggttctccctctacaacatcaagtgctgctgatttaacttttccttctttcacagcctccatcaaatcatcaattgcaataataggacccctagatgtattgacaatcattacaccatctttcatcttggtaattgcttctttatcaatcaaatggaatgtactgtccattaatggtgtatgtaatgatacgatatctgcttcagcaaacaattgatccagctcgaccttctctgctcctgatgccttcacaacctcttctggaagaaatggatcatacgctatcattctaaaaccgaatccctttgcaaactctgctgcccttctggcaatatgaccaaatccgacaaagcccagtgtctgactagatagtctgtgtggtttaaatccggcatttgccagccattgccctcgctttacaagatcgttgtaaaaaacaagctgtctctccattgcaagaatcattgcaatagtatgtgttgccacttcatccaggcaatgtaccggactattacaaactttaatcccccgctctgtagctgcctttacatcaattacgtcataaccgattccgtatcgtaaaataactttgcaatgttctaaggcatccattattcttggagtaatctgtctataaataaccaaaagcgcatctgcatctttgcatttttggataatttcatcttctgtctgacaatcctccaaaacaaattcaattccattttcctcaaaaatctttttctggatggaataatccaatccatccgctgaatttttgtctactacgattgctttcatttttttcttttcgcctcctgtttctcagtaagttcaactgcttttgttttgatttagccatattgtatattttgcttataaattgagtcaattttcgtccttgtttgtttgtttttcactcattttgtactttttaaagtacatttttatccgtttccattattattttgtcggtgttttatgcaaatgtcttttttttaaccagatttttcacataaaaagacataaattttatttatttagaaatccttttcctaaataaacatcaaaaaatctgccgtaccaaactggtacggcagactcttaggtggacttttatgtcaaatgttctcttatctgctctactcttctgatatattcttcttcggacagaatcacaggggttctatcatctttaaacggaccaccccagtccggtccgttttcatatttcggaacaacatgaacatgaagatgtgagactttatctccatacgttgcatagttaatcttatccggattaaaaacgttatgaagtgcttccgctgttttcgctactgcataaatcagttctgactgttcctcttgattaagctgataccattctgttctgtgatctgtattaaacactacaatacattttcctttatgtgtctgatcacgaaaaaggtaaatagaagcattccccatatctgcaatatgtgtcatcaactgattaagtttttcacctttctcgcaataataacaatccttcatgtagtacctcctatatgtaaccattgagccgtggcaagaattctgaaactgccggcacatatgtcacaatcatcagcacaagaataattgcgacaaagaatggcagcaatgtcttaataacctgctcaatagttacttttcctactttacatcctgtaaacagaacacttccaacaggtggtgtaattgctccgatacacagattataaacaatcataataccaaactgtaatgagctcattccaaatcctgtgcaaatcggcaggaaaattggagtaaagatcaaaattgccggagttggatccataaaagtacctacaaacaaaagtactacgttgatgattaaaagagtaattactttactgtttgtcaatgtcaacattgcattagaaataattgtaggaatctctgtatatgccataatccaagacatgattgaagatacaccaatcagaaatacaatgataaccgttgttcttgcagaatccagaatgattttaggaagatcctttgctttgatacttttataaataaagccaagaatcaaagcatatgcaacagccactccagatgcctctgttgctgtaaagattccactcaaaatccctccaataataattacaatcaagaaaagactaggaattgcatctacaaaatatttcacttttgttgctgcatcaacatgatttgtattgatatatcctcgttttttcgccatgtatcctgcaacaatcatgaccgctaagccccaaaggattcctggaatatatcctcccataaacagtgctgctacagaaattgaccctcctactgttgaaaaaacgataagagcgttacttggcggtatcaacattcctgtaggtgctgatgcaatgttaactgccgctgagaattcctttgaatatcccctttcagcctcgattggcccgattgttccacccatggctgctgctgcagcatttccacttccactgatagctccaaagaacatgttcgcaagaacattactttccgcaagagcacctggaagtcttccacacaaagcctctgcaagccttataatcctgatagcaataccaccattattcatcaaattacctgcaagaacaaaaaacggaattgcaagaagagggaatgaattcaaacctgtaaacatcttctgcgcacaagtcacaagtgctacatttgtaggaagaataactaccattgccatcgccgaggacatgccaatcgcaactgcaatcggagctcccatcaataagataataacaagtgctactaccattactattgttgctgtaattgctacatccattttattccatctcctttccaccttctgtttctggctgattcagctttttaatcagatcatattcattgcataaaaaatataaaatcattgccacccctgcgattggaatcgcaatatagataactcccattgtaataggaagaatagaatctgcctgtgtcatctgtttcatagctccggcatatcctccgatcagaaggactccgattccaaaaagcactataatcagctcgttgatcatctcaattattgtctttactcttccatgaaatttatctaacacaaaagtcattgccatatgatctctttttccaaaaacataagcaccaccaagcattgccagccagataaatccataggtcaccacagactcactccatgagctaggactctgaaatacatatcttgtcacaacctgatacacaacaagaatcgtcataataccaaaaatcaagatacaggcaacctctaatattttatctagaatctttctaatactattcatttgagccctcctctctgagtgctttaatctcatcataaacttttcttgtcacagtactctcattagcaatctgctcctgaaattctttaaagtttgctgcaaaagcttctttatctacatcctctacgaattcaattcctttctcctctgcttcggcaatactctcgtctaccatctcactccagctgtcaaattcggcctctacacctatagccattgcatcttctatcattttccgatcctcatctgtaagtgaattcatgaactttgtacttgctacaacaaaatcagtactaaagcaatgttcagttctggaaaatactggtgccacttcataatatttttttcctacatagtcaatttcatttgactcggcaccatcgacaactccctgctgcatagctgaatactgttcagaagcagacattggcactcctgttccacccatcagctgaagcatctttaccatattatcagactgcataacacgaatttttaatcccttcagatcctcaggtgttctgacagctttctcacagaagatatttcttgatccagatccgaatgccccgacaatcttaaagtcatattcttctgtagaatcaaacaattcatctaacataccatttgtataggcttctctctgatgatcactgtcctcaaacagataaggcatactcaaaaccgaaaaatcatgattgtaactctctaccattgtcgcattggcaacacacatctgcactgcattgttctgcgtaagctccaaggccgctctctgatctccaagtgttccgttcgaatagatctttactgtaaatcttccgtcagacctgtcttcaatctcctgtgctgcacgctcaagtcctttataatgcggataattctctatgttattataggcaattctgattactccactcgtaaccttttcatccgttgaattctgtccacaaccacttaataccatcgttgaaagaagtgaaacagaaactaatgttgcaaataatcttttcttcataatttcctcctattcacggttcaacaaatgatcttcaatattccaaaaatctccggtaaacacagaagaatcactacaataagaatttccattttccattgttccgatcacagccatatcatctgcatccagttcaaaatcaaaaatattaaagttatcagcaattctatgtggttttgaagatttcggtattacgcaattgcctctctggatattccatcttaaaatcacctgtccgacattctttccatgtttttctgcaatttcaacaagctttggatcatttaagatatttccctttgcaaatggtacacaggctgtcattacaatatcgttttcctggcagaatgcgtaatcttcctttttctgaagccatggtgaaatttcaatctgattcatcatcggatagaacccaaatgtctctttcagcttttcaagatgctctttcttaaaattcgatacaccaacttctttaaaataccctttttctttatatttcaaaagtgtttcaaaagcatggtttcttgcatattcattctgactcggccaatgaagcagatacatatcaatatagtcaatatttaacgctctcatactatattcaattgctacttccggagtcttgaaacttgtcggccatatcttacttacaacaaacaatttttcacgatcaattccactttcccggattccccgtccgacatacttttcgttctcataaaaatttgctgtatcaatatgtctgtagccaatttcaattgcactctttacagcttctacaccttcttgttcttcagacttataacagcctaatcccagcattggtactttcgtaccattcctcatcgttatgtactccattttgttcctcctttatttatagttctcgtttgaattggttaaattgtatagccttgctgtttattgagtcaatttttatgctttttgacattttttgtacttgttttgttcattttagagtgcatttttctttttaacagaagtatttttgttttacttttgtacatatgtctattttttaaccaaaattcgataaaaaggaggtgattttgtccaatcacctcctttcgtttaaccttttatgtcacatcctctgagccttgacatcgtaccatacattcgctgtacatcatttttcatttcatctttagccatcattggatagcgttgctcaagcattctataaattgccctgtgatattcagaccccttttccataccatgttgctgaaaacattcctcataagcaagctggtttaactgattacgatacattgctaatggacattcaattgatttatacatatccattaaatacctgtttctcgaagccttcacaatagtttcatgaaacattttatcagcatttttatactctaaatggtcgtgtgtctggtcgattttttcaaagcggaaaactaatttttttaatacttcaagttccttttcctgtatccgctttgcagccagatatgcagcttctggttccagcatcattctggcttcataaatccacagacactcctcataacttattttctttactcttaattctttgccctttactttttccagtattcccttttctgtcatctcggccaaagccattttcaccggagagcgggaaacattcaattcttttgcaatttttgattccacgatacgatgctgtggcaataaatttccgttaattatttcacggtatatttgctgatatacaagtttacttaatacaagaaatggattccgatctatttcttgctgaatcaaatcttttgcgttttcactcattgaaaattcttccattattttctcctttccaagcgattcttaatatttatactaaattcttactctatacatctcttacctcctgttcctcatacacaattcatttgtttcataacaccaccactaaagaatagcacaaaaattaatcattcttcaatccaagacattattcttttttgcatatttttctcacacataaccaaaagcaagagaaaagaatcttttctgactttcaattccatctcctgcttctatatattccaatatttttttcactttatttccaatgaagttcatgtagctcaccacttagattcattcctgcaaatccattctgtcgcagtgcttcatacaacacaattgccaccgaattaccaagattcaatgagcggatatctccgttcatcgggattctcatacagtcttcctcatgctctacaagaatctcttccgggattcccgcactctcttttccgaacataatatagcaatctgactcataatctacttctgtgtagactttgtgcgcttttgtcgttgccatatagattttagctcccggatttttttcaaggaaatcttgataatcaatatatgtcgtcacatccagatctttccagtaatccatgccggctcgctttaatgatttctcatttaatctgaatccaagcggctcgattaaatgaagtcttgtccctgttgccacacaggttcttccaatatttccggtatttgccggaatttccggctcataaagtacaatgtttaacataattatcgcctcttttatcttcttattcgttactgttcacacgatgtgcgaccagcaacgcatctcgccattttaaatcgcctttggcgatggggcgagatgcattcaagttaaaacatgcatcctccgtgtcaatcagcggagtgattgacacgggagtgaacagtaactcttattcttctgtttttgtacacagttctaattcttttcgttctttccgccaacggctcagttcatccggtgccggacgatccagataacgggtttcttctccatttacaagtgttcttgcattctgttcttttacaaatccgatccttactgccggaacacctgcattcttcaagctttccaatgtctcttctccatgctctgtcagcacaagataacttccggctgatgtgagaagatatggattcagctgaaagaattcacagatttccaccgtttcctgcttaagtgcaagttttgaaaaatcaatctcaaaccctatcttttctgcctctgcaagttcccataatccgcagagtacacctccatccccacattgtctgctctttgcttcttctggaagctgtaaaatctgttccggaagtatcagtgattccttgcagcgctttgttttttctataaaggacggtgtaaatcttgtacgaagatctgcttctgcctcttcaaccaatcgcagtgttccttctaatcccgtatagccacaaagaatgatttccgttcccggaaaccattttttcatctgctgttttggattttctttcacgccgacagcagtaatctgaatcactgtccgcaaaacatactctgcactttcagcctgtacacaggtaatggcaagtcctgtctcctcacagatctctgtcaggattctcatgatattttttagttcctgctcgtcagaactttcaggaaacaaaatctgtactgaaaccgctgttggtctgactctctttgccgcaagatctcctgctgctttaatcactgcatatttcacctgtgccggtgcttttccgcttactgaagcgctgctccagacaaaatccttttcgtcagatatcagttcggaactactttcttcccacgcagtttttcctgttgaattcctgtttcctttttggatctgtttctttacagaacgattccagatcgtctgcgttactctccctgtccgcatcacactctccttagaccagatatggaatcaccatcgttgcaaccattgcaacaataaccaccaaaataataattgacaccaaacgtcttacttttttatcataaaaattcatcttttttctccatttccattaacaaaaccatatgcaaatatctttctaatatctgcaacgctatactagtcctctattatataaatcgccgcatcctgattcagcttatttctatgtctgtaatcaaaaagatgcaactttccattcaatcgctccagatgagtcatctttcgcaactggcggctgtcgtatccttcataatccttcagatacttgtgctcttctgcctctttcttataaaattcagacgctacatccttttccactttgctctctccaagaaatgccggacgattcttcacattatctctcaggtaaagatctaaagtcatgctttcaagcaccttctctttaaaatccgcttctttcttctgcattttctccgaacatgtgaattctgctaattctgattctacaaagtcccacaatatctcatagcgagtaagtcttgaatgattcaacccaaacaagcctttcttctcataataattgcccattttctcatacatggaaaatgcggatgggaacaattcaacaagaagcctcatcgtatgactaaactgaaaactgttatagtaaacttccaccatctcttccactttcttcagacggatcacatcactgtatggaagccattttgttgaaagcacttcatacggcggacgattctggcaaagcagctcgtattctttcatcttctcatgcatcacagagccatgcagtactttcagaaatccaagctgaaactgatccggttccatagaataaacttcattaaaagaatgagcaaaactatcataattctcatatggaagacctgcaatcaaatctaaatgctgatgcacatttcccttctcatgaatccttgctaccttatcacgtactttttccagattcatggatcggttgatctctttgattgtctgtttattcgttgactgaatcccaatttccaactgaataagtcctggacgcaaactccggatcaactcaatctcttcctcattcagaagatctgctgccacttcaaaatgaaaatttgtaatccctttatcatgctctttgatgtaattccagattgccatcgcatgatcatgcttacagttaaatgttctgtcaacaaacttaacctgtggcacttcatgatcaataaaaaactgcagttctttcttcacaagttccagattacggaatcgaagacatttatcaattgaagaaagacaataactacaagaaaacggacagcctctgctcgtctcataataaatgatacggttcttgaaattctcaatatccccatagacaaacggtactttgctcagatccatgatctgtcgaaacggtgtcgcagcaatctgtttttccttttcccgaaatgtgattccctgaatattgatcaactcagctgcaccacggccttcataatatgctacgagctctgcaaaagtctcttcaccctctccgcgcatgataccttctgccatcggatatttttccagaacttctcttgcattataagaaacttccggacctccaagccagatcttcgtatccggcagaatctttggaatctcctgtatcaattgtcctacttctgtcacattccataaataacaggaaaggcagagaacatctggtgcctgcttataaatatccatcaaaatctcatcaaatggctgattgatcgtatattcagaaattgtaatattgctagccggatgctgctcttttgcatatgcgcgcaggcaatagaccgcaagatttgagtggatgtactttgcattcaccgctgcaagcaaaatcttcatctttttataaacctcttttcctgtcaataatgtatatttgtaaacattttcctttttaggtcttacctttctattctgaatgaagatgtgagaaatgtcaagatatgtgaagttgtgtatataacaaaaaagggaaagctgttactgttcacacgatgtgcgaccagcaacgcatctcgccattttaaatcgcctttggcgatggggcgagatgcattcaagtcaaaacatgcatcctccgtgtcaatcagcggagtgattgacacgggagtgaacagtaaagggaaagctatcacttacgataacaacacaaattgtgtcagattatcgtatgatagctttcccttattttgcagctttaatcaaaagccacctcttctttctgctcctcacggaaaataaccccaaatacttttctgacaatcggtcctgcgaagcacagctgccagaagaatgccattgggaaattgaatactgttgtctggaaccacacagcaatcatctgatttcctgcatccttaaagagcagtgttgctgcaaggctcatcagcgggcacattccaatgatggataaaacggatattgccagcacgatcataaacggattatctttctgtgggttcacgatcataaatgctttcttctttgcaatcggtcctacgagaaagaaatccagaatgaaagcaatcggtcccatgatgataagttcatggaatgctgccagaaagacctcattactcattcctcccctattcagggaaatgttgtagcagatcattgcataaaccatgacaaaaaccatcatgattgtgaaaattacttcttgaaacttattttttggcataaaaaatcctcctatcatgataagcgtaacagattgtgttgttcgttcatcattccggaaggaatgtatcgtttccaatataaataccattctattcatttttacgtgcattgcgcttcgaacttggcccacaagcgttaccccggtagttaactcagcccaggcaccctcacggcacccgagaggttctgcttagtgctgctccgttcccgacctgacacggttcacagagtcccgtcgcgtgagacccagacgtcaacgtcactttccgggggcagccctgcagactgtcgccctctgcgcaatatcacccctgctatagcggattgcaggttcaaggtaccgctaccaccccggctgcacggattattattttacatgataaatgaatgcttgtcaagtatgctgctctttcttttgcacaagattccacatgattttatacctctgtgttacagactctgtgcttctgcttttttcttcatcttcctggcttccctgagttctctgaaaaactgtttcatcaactggctgcattcttcttccaatacgcctgttgtaagatctgcctgatggttaaatgcctggatattcagtagattcagaatggaacctgtacatcctgctttcggattcatacacccgacaaccactcttggtatacgggactggacaattgcacctgcacacatctgacatggctctaatgtcacatacaatgtacattcttccagacgccagtcaccaagctttttgcttgctttcttgattgctgcgacctcagcatgtgccagtggattcttgtctgtattccgtcggttataaccgcgtgcaataatcttatcttcatgaacgatcacgcaaccaatcggggtttctcccagattatacgctttctctgcctgtttcaaggccgcacgcatatatttttcatccgttgtcatcctcattttgtttcctttcggttattgtataaaaatagcattaatattccttttcattctgaataaactatatagaaaaattcttttcaggggcttgctatgaatccgggaagttattatttatatgagtacgaatcctgctgccgccgcagaaatcttggttttctacaaatttcatcacataattattcttatctcttaacacttcatgttaaaaatcttccgattgtccctggagaacagttggaagtccatgcatttattctcgaaaatcaaacacttataggttctccggttgcacttcttcagtgctctggtcagaatttatccacacaactggtcatttccggggaacgttttccacataaaagaactcttaaacacattgatgggttcattattttctccatcacccagaatcgatcacagcattggattgcctccgctgtacctctgccggatttttattctttttctgattgctctttatcaacagaagagattttatcctctgaacctgagaatccatccctttcggaagaatccctcataacagaagacactgtatctgagactgtatccgaagcagcattatctgacgcttctattgatgctgcttcaactgaggaggtaccaactgaggtgacaccaactgaggtgacaccaactgaggatgcttcaattcaagccagaaaaatcacacacgcagagatttccacacttccgcgcagattctggccacttgccaacaatagttttcttctgcatggctgtcataattatcatcaccttctcctgatcaaagaaaaggatcatctttggcttggcgttcccggcctttacgatcccagagaagcacatatggctaacttgttcggctttcctcaatttaccagttcttacatctctattctggaacttaccgaagatgaatgtgaaaactctgaatctttcggtcactggtgtcgatacttaatgtgattcttaaaaagaaaggaaaaagatagagaaaggaagcgttcacagcggatgcactccttttctctatcaattttaattttaatccaaataaattggcggttcgtaatcctctccaagaagtactttcttgcgttcctgatatccaaggaatgcccattctgtcatatctgtccatttatgatttgcacggtcataaacctgcacatatccaattcttttcggatgcatacgtacgctgttggattcatattctcttcctgtgtatggattaatgtctccaatctcttcctgtacaggctcttcgtatgttgcctcttcctgcaccggctctgcctgctgtgtctcataggatgaaacttctgattcttcatatggttctgcttcttcctctgccggctgatcataatcttccgtataggaaacttctggttccacagagttttcttcttcctgatctgattccggcacttcctgaagctcttccttatattcctcttcttctgtctgaagatcttctctgacatcttcagttggctctgcttctactgcattcttttcaagttcagcaagttcttcatgcatatcataaatctcaccgatcgtcatgtcacgttcttcacccgtaagctgctgttcttccttctctgtctccaccgtttcctctgaaaagctctcttccggctgttcctgttcattccattttacttcctgcttcctgatacgtccggctgcgctctctgtaatctctcctgacatgatactcagctgaaacggacagcccagaatagatgcaatcaatctcatatcctgttcctgaaaattatcccttccaagacgctgtgttaaattctgacgtgacatcttctttcctgtctctttctcaatcgtctccgccagttctttgatcgtcattccctttcttcccaggacgattttcacctgttctccaaatgttaaatcttccatttacttctcctccttgtgtattatttatacttctctcttatctgtcgatcagaacagtttttcacttaatttgcagaaacatattcttccaaagtaagtccgttctctgtcatctcttttgcagcatctactcccacataacgataatgccacggctcatatacaattcctgtaatatcagatttatcctgcggaaaccgaagaacaaaaccatactctgaacaatgttccatcaaccacttttgctcttctgtatccccctgtttctcatcaagctccccgtactttgtcgacataatgtcaactgcaagaccagttgcatgctcgcttgttcctggaattgcaactgatttttttgtctcatcatacgcatttaacggtgtatatccctgattgatccagtcctgcatcgtcgtattaaagacatctctctgcttctcataagaacgatatcctgatgtcacatacatgctgagtcctgccttcttcgcatcatccagcatcttattcagactgtctgccatcctggaatctacctgttttccatcacttatctccgttaaattcgccggcacataagaagtatccaatggatgcttctcattcacaagtgcaagacaccaccggtcatcatcacttgccagcaactctgcagtattttctgttacttcttctctgtctaactctgtctgcagttcttcgttcttctttgtctgctcctgtaattttgcattgctgatttccagcttcttttcagcttttttcaatgtaattgaggagattcctgaagtaattgccactcctgcaattactcctgccaaaacacccgtaatcatcagtttctttgctctgtctctgaacaatgctttattcatcttatttaatttcaactccatctgtatttttcatcttatcctctgtaatatttagaatcttttccgtttcattcccccggcagatcattctattccttcagatatcgcacttcaaatgtctccactttgatcggtttattaaataatgttccctgtgcataatcgcatcctaattcctgaagaacattcagctgatcctgtgtttcaacactctccgcaagaacagaacatcccaattgatgacaaatatcaattacggcctttgctactactctgcttcttctgtttccaaccagatttgtaatcaggctctcatccagcttcaatccatcaaaatccataatggacagaatcgaaaagctggaattcttagctccgaaatgatctaatactacgcggacattcgcttttctgatcttactgcatgatgccgccagcatctcctgattcgtatctgtataagattcggatacttctacttccaaatattcgcataatacctgatatttctcaatcagcgcactcatctgatccgcaatgttctcctgcctcaatgtttcacctgcaaagtttactgaaatcggcaccatctggattccttctgtctcccacttatgaaggatctgacaaacctgttcaaatatatagagatcgagataatgtgacaaccttgtctcttccagaagattaatatatcttcccggatccataattccaagatccttatgatgatatctgacaatcgcttcggcacctgcaatttctccggtctgcacatcaatcttcggtaccagacatacaataaaattcttctgttcaatatcctccagaagatcctttttgatgattggctcatgatgacctttacgcagatttttataatacttctttttctcttcccgcatcatattctctgcactgatcacaagaccattcacatctatgtctacttttccccaggcataccctactgaaaccagtccaagacttatgttctcaagctttgtatatgcaccatgtacctgttgtgtgaaatcttcatatgaagcgttctctacaagaaccagatactcatcgcctgtcattctgtatacattaccattatggaaatactccgaaagcacttcaccaactctggtgacaacttcatctccataatctctgccaaattctttattaaaattcttcagtccattaatgtctacagaaagagctcccaatgtcttcaattcttccggttccacatgatccagatatgcaacaaaactatttctgttaagtactcctgtcagattatcatgataactgagatactcctgctgtttttggagtttatgaagagtgattgcctgcggtatatacggaatcaccgtacgaagcaatccaacatcacatccgccccggtgaactccaactgctgcaagaattgctactgtattctcatccagctgcaaactcacactgtaatcggcctctgttgaatttgtaatctcctgcttcatccactttggctgctgttcttccggaagcatctttatcttatctctctgccatggaacattctctgcacaccactcaaagatggtctcaatatccccatactctttctcaatatagtacacgtattctgaatcataataatcacgtaccgcacgaagtacatcgtttacgatttctgaaagagaacgtggcttttttctatcacccatatcgtttttcctctgtctttctataattttagacactcagataagtttattgtattatactacgaattaaaatgcaatacaaaaaagtttcgcagttcacttttaaatgtaaaaaagagggggatttcccattccggaaaatctgtccctcttctataattaaatgatatatcctgcaggtacttctgatctctgcacatctacatgctctagaaatctataaattccactttttatcctgtgaaacacgaagtcggttcatcgctcttgccagagatgcctgcgtatgataatactgctggatactctgctgctgacgtaacctttcctctgcacgctctttctgctcctgtgctcgtcgcacatcgatgtcttctggtttctcggctgtatcaacaatcagtgtaactcggttgtttacgatttcaacaaatcccacgcccactgcaatgtctttccaatcttcgccgtccagactcatatgtgcaactccgacattcacagcgattaccatattctcatgatttgcaagaattcccttttctccatccggagccggaatgatcagcttcttacaacgaccttcgtagaatacaccatcacttgctatgattttcagaccaaatgtatccatatgcacattctcctatttcaacaattactcttcttccatctcttttgccttggcaattacatcatcaattgttccgacattgaagaaagcgttttccggataagcatccatttctccatcgatgatcatcttaaatccacggattgtctcttttaatggtacatattttccaggaattcctgtaaatgtctctgctacgaagaatggctgggacaggaatttctgaatctttcttgcacgcataacagttgctttatcctcatctgaaagctcttccataccaaggattgcaatgatatcctgcagttctttatatttctgaagaattgcgatcaccttgttggctacttcgtaatgttcttctcctacaacgtctgcttccagaatacgggagcttgactccaacggatctacggccggataaataccctgctcaacgatctttctggaaagtacggttgttgcatccaggtgggcaaatgttgttgccggagccgggtctgtcaggtcgtcggccggtacatatactgcctgaaccgatgttacagaaccgttctttgtagatgcgatacgctcctgaagttcacccatttctgttgccagtgtcggctgataacctacggctgaaggcatacgtccaagaagagctgatacctcagatccagcctgtgtaaaacggaaaatattatcgataaagagaagcacattctgatgctgctcatcacggaaatattctgccattgtaagtcctgtctcagcgacacgcatacgagctccaggtggctcattcatctgtccgaataccagggctgttttctccagtactccggattctttcatctctgtccagaggtcgttaccctcacgggaacgctctccaactcctgtaaaaatggaatatccgccatgctctgttgcaatgttacggatcaattcctgaatcagcacggtcttacctacaccggcaccaccgaacagaccaatcttaccaccttttgcataaggagcaagaaggtcgataactttaatacctgtctcaaggatctctactaccgggctctgatcctcgaatgtaggcggctgtctgtggattacccattttttagaatctgtaatcggctctccgttatcaattgtctcgccgagtacattaaataatcttccaagtgtctgctcgccgacaggaacctgaataccggctcctgttgcagtaacttccatatctttgcaaagtccttcacttgcagcaagcatcaggcaacgcacctcattatttccaaggtgctgtgcaacctccatgatgcatttctttccattattatcaacttcaagagcatctttgataaaaggaagatcaccgttttcaaacactacgtcaacgacaggtcccataacctgtacaattcgtcctttattcatgttctctctctctttctatatttcagtcattacaaactgcaacaacctgctgtctgtaacgcatctcgacattttaactcttcttctgctgagctcttgcgccggcacaaacctctgtgatctcctgtgtgatcgcagcctgtcttgctctgttatagagaattgacagatctttgatcagatcctgtgcactgtctgttgctgacttcattgccatcatacgggcattatgctcactggcataagcctcaaccagacatccgtagatcataccgttgatataacttggtacaatactgttcatgacatccataggagatggatttagttcgatttcctcgcgatacatgttcaaaggcatcttcatttcaccaaagtcccctctctcgagtggaaggagttttaacacttctgcctctgactgaactgcattttccattcgtgtatatactacgtaaacttcatccagctcatgattgttaaactgatccagaataaccgctgagatgtcacgggcacgatgcatggtcggcttctgaactgtataacggaagtttgtatcaatatctacatccttctttgcgaaataatgacgtccaagctctcccacaacaaaaagcttatgctgacccggcttggaaagaatctcttcctcaagcttcacaatattgtgattgtatgcaccggccagtcccttgtccgccgtgataacgatcgatccaatcttacgttcctctgccggaatgttttccctcttgttgaaataactatgatgtaattctggtagatgacgtaaaatacgactgatctcaccctgcagcgcatagaaatatggttctgtatctgccagcttctttctcgcctgtgtcagtttggaagaagagatcatatacattgcattggtaatcttcattgtgtctttgacactgttgattctgctctgtatctctctgatatttgccatattaacacctgctcttcttgaattccttcgctgtctctacgatcttgtcgatcagttcctctgtcaggactttcttctcttcgatttcctgaccgatttccggatgctctgtctcgaacatctgaagcatatcatactggaactgtttgatttttgtcttctcaacacctaagagtactttatgtgttgctgcacacagtgtaattactttctcatgcaaggaaagtggatgatacagtggctgtttcagaagttccatcagaccacttccatattccagttcttccttcgtagctgcatcaagatctgaactgaactgtgtgaagacttccatctcacgatactgcgccagatcgatacgaatacttcctgatgctttcttcattgcttttgtctgagctgcaccaccaacacgggatacggaaagtccaacgttgaccgccggtctcattcctgatgcgaaaagtccactctccaggaagatctgtccatctgtaatggaaataacattcgtcggaatatatgctgatacatctcctgcctgtgtttcaatgatcggaagtgctgtgatagaacctccgcccatctcatcactcaaacggctggatctctccagaagtcttgaatgcaggtagaatacgtctccaggatatgcctcacgtcccggagaacgtccaagcagaagagaaagtgcacggtatgcaaccgcatgcttggaaagatcatcataaatgatcagtgcatcttttcccttgtgcataaagtactctgccatagcagttcctgcatatggtgcaatatactgaagcggagcacagtcacttgctgtggaagatacgatgatcgtataatccattgctccgtgtgtctgtaatgtgttaacaactttggctactgtagatgctttctgtccgattgcaacataaacacagattacatctttgcctttctgattcaggatcgtatccagtgcaatggatgtctttcctgtctgacggtctccgatgatcagctcacgctgtccacggccgattgggaacattgcatcgatggaaaggatacctgtctcaagcggaacgcttactgacttacgatcaacaattccaggtgcctcattctcgattgggcgatagtcgtcagatttgatctcaccttttccgtcaatcgcctcaccaagggcgttgacaactcttcctacataagcgtctccaaccggaacgcctgctttctttcctgtacgggctacctttgtgccttcacggattcctgtgtcacttccaagaaggatacatccgatctcattcttacgaatatcctgtaccattcccttaaggccgttttcaaaagtaacgatttccccgtacatggcgtgatcaatcccgtagattgtggcgataccatcgccgacagtaacaacagtacctacttcactgtccttactcattgtatcaaaattctctatttcttctttcaggatagaaataatttcatctgaattgattgaactcaccttgttcacctccaggtcaatctttgttctaatctgttcaggcgtcctttcatactccagtcatactcattactgccaacccggagaataaatcctccaagcagtgctttgtcctggcgaacttcgattttagcacgatttgcgccatatttcttgcaaaggaacgcctccattccttttttctgttcctccgtcggaggctgaatacatgtcagaactgcgttcagaacctgattctgttcatcacagtatctgtcatatgctgtgaagatatcttcgatcagatccattctctgatatctgcacgctactttaaggaaattttttatctcctttggaaatactctgtctaccacattcatttttttctgaagttcaatggtaggattcgcgaaaatctcgtgaagctgcggtacttcctcaaaaatctcacgtgttttctgtacagcttcttttgggacacctacttcatacaggacacgtgcatatctgattgctgccattgggcagtaaatctgactcttacttgtctgtgtcttcatctgtcccacctacttctcccaaaaactggtcataaatgttctgctctttgtctcccacgatcttctcagcggatgccatagccagtcctgcaatctgagtctgaagatctttcattgtcttctcacgctcaatacgtacattctcttttgcagcttccagaagatctccggccttgcttcctgcttcacttacgatgcggtcatactctgtcttagcctctgagcgtgccttctcaacaatcgctgctgattcaagctttgctccctttaaagcatcttcatattcctgtttcatcttctgcgcatcactctgtgcatcctgtgcaccctgaagaccatctgcgatcatctgtctgcgcttctccatgatatcactcaccggtttgattagaaaatgtctcaacaggaggaagagaacaataaggttgataatggtatagacaaggttcatatttaactgaagcaccttttacacctgcctttcctgttatctgcttccatcattttcataagattcttttcgtttcttatttcaggaagaagatgatcaggataccaatgatgaaaccgtagatagctgttgcctctgcaagagcacatccaaggataaggttcttactgatcttgctttctgcctctggctgtcttgcgatagcttctactgctttacctgttgcatgtccgataccgatacctgctccgatacctgtgaatactgcgatagctgctccaatagcaataattgttgacataattttaatctccttttcttttcaatagaatgtgttaagttcttactccatctcttcgttcataaacagagatgtcaggaatacaaatacgtatgcctgaagtaggccgtcgaaaatatcaaagtaaaaactgattggaatcggaatgatcagtggaacgattgctttcaaaagttccatgactacgaatcctgccagcatgttaccaaagagtcgcatacaaagcgacaacggccggatgacgatttccaaaatcatgatcggtgctacaattggaatcggctgtgcaaaatgctttgcccagtgtccgaatccattcttgcggatacctgagaattcaatgagacacatactcatgattgccagggctgccgtcacgttcagatctttcgtcggaggcttaaagccaaacaatggtgcaattgtgtttgaacaggcgagatataacagaaccgtaatcagatacggtacatagcccttgttctctttcccaagtactccgacaaagaagtcctcagcagcgccgataccggcttcgagagccaactgcacttttccgggattctcaacctttaagtttcttaccaggataatggatgctatcacaagcactgccatgatgatccaggtaactactacagattcattgatcccgccaagaaccggaagtgtgaacactgtctcacaattcagttcttccataagattgtctgccagatttcccgtattgctccctccctttctacctaatgtatattgctgtattttgtcacttttcgtatacagcatggcaaatgttactgcttataatcgcattaaaacgtcatgttctccgaaaagttgactaaatattactcccatgttttctctttgtcaacgttccacttcaacaagttaaattcataaaaaaagctctttttttatttcaatttgctctttttttattctacgttttgtctattttttattacttttttaaccgtttttcgctcttgttttagaatccgctctttttttatgcgcattttccacaataaaattgtttttatttctgtacatttgtacgattcaaaaaaaaattcatagacactttgtcttaatttgtatattaatgataatttttctcctatttttcttatccttttcagaataatagcaaaaacagatgttacatttttgttacgattttgttttttcaaaagaaaagcacccatttttaaaccatagcataggtgtgataaataaaattttatttttcaacatatacttgttttagctacgattatgtgatatagtgattgtagctaagaaaagagatgaatatgacatattcacacaaaaatgacccctcatgagccgccaactcatgaggggtcttctcttttttgatggttgagcatccattcaggctaattgtcgctgtcatctccgtctagctatttgcaaactaattacaaatgtaacaatatatgtttagcgttttttcaattgctggtaaacatatgataccggcagtccaaccacattatagtagtccccttcgattccatctatatacgccgcaaagcttccctggattccataagctcccgccttatccatcggatctccggttgcgatatacgcgcggatttcttcttcgctcatctcatgcacatgaacctttgtctctaccgcatggttaatgatttctttctcgcatgcattattataggaaagaattgcaacacctgtatagacttcatgtgctcttccctgaaggcttagaagaatctcatatgcatgatcttcattctttggcttgccaaggatttcttcgtcacgtacaacgattgtatctgctccgatcacaattgtatttttcaattctactccctctgcctgaagatcagatgcaacattttctgctttcatcaatgcaagttcttctacaatcttctgtggttttgtacttgtatagacttcctctttattacttacctttacctcaaattctaaaccgatttgcgcaagcagctctcgtctgcgcggagatgctgatgcaagaatgattttctgattcattatcattatcctttcctattattataatataattttcaccgatgtcatttctttcttcataatagcataactgttcagagccaacctccaaaatgctacgcatttcgtcggtgtggcgtatccgccaaataaaatttaaaaaacagtcttaaaaatgcaagcattttatacctgtttttttaattttgcttggctctgaacaattacataatatcataaaaagagtggacagcaaaactaattcctgctgtccactctcttcatattatgaaagactttgaaatttataagtcttgttctcttcaatcatctatcacattcgatgaaactccaagtgtcatatcttcttcaagataaatcacagcttctgttccgtctgtgattcttccgctgaaatgtccggcgaattttccggccagatcagatgttccgctcacctggactgtaactgccggttttgcttcttccggaatctcaatcactcttttctctccagactgcattgccccgattgttactgtttctgctccgttgaacttaacctgaacattttccagttcaagcggtgaagtgttacggattgttatgttacttgtatactgtccacttgcttccacatattctgattttctatataaaaacatgcctgtaaacaaaaatataactgtaaatgcgatgatcagattctgcaaaactcttctcattcccctgcctcctataaactctctttaaaatttctattcttattttcctttattacactaacagaatagcattcagagatttctttttctagagacagattcacttaatttttttctgtttttcatcgttttgtcattgatttcgttgacaaacattgtttatttcaagacaatgtaatcgtttccacacatttttgttatattttcacaatacttcttctcacagcttattctatacaatatccaaataggtcttatgctccggtgcaggaaatgcacggtcaagagcagcgtattcttcgtctgtaaggataatatcttttactgcccagttctgaagtacatgctctgttctgccgcttcttggaattgcaatcacctgatctttccgaagaacaaatgcgagaagtacctgcatcggtgtaatgccacgagcttttgctattttctgcacttctttgttctttaataaacttctttgcaggcttccagcctgtgcaagtgggcaatacgccataatcggtgtctgatgttcttccagccagggcatcagatcatactctatcccacgggatcccagatgatacaatacctgatccacctgacagtgatctccattgggaactgaaaacagttctttcatatctgatgtatccagattggatacgccccagcttctgatcttgccttttttcaccagttcttccattgcatccactgtttcttccaacggaatacttccgcgccaatgcaacagatacatatccagataatctgttttaagattatgcaatgtctggtcaatactgtcataaatctgcggacgtcctgcattgtgcggatatacctttgaaacaagaaagattttttctcgagaatatccctggatcgtatccccgattaatttctccgaaagtccatttccatacatttcagctgtatctattaaagtaaatcctgcatcaagccctgcctgaagcgccttcttttcctgttggtagattgacagatgttcaccaagcatccaggttcccataccaagacgcggcattttcattccattttttaatgtaagatataaatcactcattttcttccctttccatatatcgaatcatcccttcagcagcccgttttgcttcctctacagcatgaaccaccgtattcgctccctgtacaacatctcctgctgcaaaaacaccttcatgtgttgtcatgcagttctcatctgtcagaagaagtcccttctctgtcgtttttaactgatccgttgtaagtaccagcttattctttggtgcctggctcacgcaaatgattacagagtctgcttctacctgatctaatttttcttcatatccgatcactttattgttttcatcaaatatacttgttttaaacatcggaccggcttcattaatcgactctattgcctttccaaacacaaagtctgcgccctccagttttgtataagacacctcatgagagcttgcggaaatgcgttttcctcttgcatacagtgtaacctcttttgcaccatgacgcaatgcagttctggctacatccatcgcaacatttcccataccgataacagctactttctctcccaattgatgtgcctccggtcttctgaggtaatcaatcccaaagtatacatttccaagactctctcctttaattccgattgccttcggtctccatactcctgttcctacaaagacactgctgtatccgtcgcggaacagattatcgatcacgattgcacttccgatcacggtattcgggcgaatccggattcccaattcttccattttctttttgtatcggtcgatcacagattttgaaagacggaattctggaattccatactgcagcataccgccgattttgcttcgttcttcgaaaatcgttactttataacctgctaatgcaagcttgatagcaactgtaattcctgccggtcctgaaccgatcaccgctactttctttccgtttttctctattttcggcacttccatcctgtcaagataagaatctgaaatgaaattctcaatactgctaaaatggattggactgctctttcttcctaaaacacaatggccttcacattgattttcatggttacatacggtggaacagacagcggacattggattatttgcaaaaaggatttcaccggcttccatcaaacggttttcaagtaataattgagtaatttgtgggataggtgtatgaatcggacacccttgctgacaaagtggttttttacatttcaggcaacgttctgcctcgtcgataatatgtaatttcattctgttcttcctcctgaccttttattcagatagaaaatgccgaccacagtttcccatgaccggcaataacttatatttttacaaatggttaatcttagttttctctttctacagacacattagatactttttcgtagtattttacaattgcactgtggtcatctttttcatttccgtcagcctttaaggactgcatgatctccatgatctctgctgtaagcggaagagatgcatttactgcatgtgcagcgttcagcgcattgttcaggtctttgatgtgaagttcaatacggaatcccggcttgaagttgtgatccatcatcatcggtgcctttgcatcaagaactgtagaacctgcaagacctccacggattgcctgatatacaagctccggatctgtcccggctttctttgccagtgtcagtgcttcggatactgctgcgatattcagtgcaacgattacctgatttgcgagttttgcaacatttcctgatccaagttctccaacatatacaacagaacctgccatctgcatcaacagttcataatatttgtcaaatgtctctttctttccaccaaccataacagaaagtgttccgtcgattgcctttggctctccaccacttaccggtgcgtccatcagttcaattcctttttctgcaagctcagcaccaatctttttagattctaccggatcaatagagctcatatcaattacaactgttcctggttttgctgcttctgcaattccaccttctccaagacatgctgcacgtacatgtggtgagtttggaaccattgtgatgattgtgtcacactctgctgctacttcagctccgctttttactccctttgcacctgctgcaacaacctctgcaactgctgtctcattaaaatcaaatacaacgagctcatttcctgcttttaaaaggttcatgctcatcggttttcccataattccaagtccaataaatcctactttcattctattatttcctttcttttaacacatctgtttcattgcttcatgcagcagctcaaagctctcttctgactgttctacataaggagaatcaatcagatacgcttcaagaatatcaagattctcctgcgtcggctcgattccaagctcctgcaaagttaatggcatgtccatccctttcatgaacagacgaagtgcctctttatcctcacttaatttattgtaataaagctgtgtgaacagtgctactgccacgatttctccatgcagcgcatgctctgcttcctttgtaaaataagttctcacgccgtcatacatcatatgaccaagtgctgactgtgagaagcttttcgtgatgttcgcgatcacaccggttactgcgatgttaataaatgtaatatcttccactgcttttgtaagcttcttatgacggatatcttcaattgcctgtgcgccatactctacaagcacctcgtaagtatactcagccatcttgtaggcactgaacagatcaattttattttcactgagatacatcttcggcttgccgttctgtatctcaattttttttgccatcgcatccagaattccggccgccgcataacggattgggcattctgcgatcacctgcagatctacaagaactgcatcgacttcatgttcgaatctccagcagtccttcttcgcgccttccggtgtatacataacactcattgttgtaaatgcggcacaggttgcaattgatgttggaatgttgacaactccggtgtcggcatattcaccgactgcttttgcaaaatccataacaagtccgccaccgattccaactacctcatcacagttttctactttgcatttttcagcatattctctggcagcttcataagaacattttccactatacaggtgcaattcatactcaattcctgccttctcaaatcctggaatcatccgttctttcactgcatcccacgctctgtttccggcaatgataaatgctctctttccaaaacgtgaaatttcttttccacactcttcaagtaaattcttttcctgtctgtatctcccggctccgaatttaattgccggatctaaagtcactttttccattttcccgctgcctttcctcttctgtcataatctatcttttaattggatgtttcggattctctccggaaaggacaagatgtacatcttccgccacatccagtgcgatccgatccatacattccaccgtattggaaccaatatgcggtgtcagaatcacttgttccagtttcaataatggattgtcttttttgggtggttcttctgagaacacatccactgctgcacctctgatctgactgttcctaattgcttctgctaacgcctcttcatcaacaacgccgcctctggaaacttgaatcagggaagcggatttcttcatcatggcaaactctttttttgaaataattccctggttcttttctcctcccggcacatgcagactgatataatccgatgtttgcaaaagttcttcccaggacacaatttctatatactctggaatatctttcccttccggacgcgacacataggaaatgactctcatatccagtcccagtgccgcctttcttgctacctcttttccaatctttccaagaccgatgatcccgagtgtctttcctgctacatcggtccctttcagtgaaaatttcttctgaaaatccccattccttaccagttcttcggattctttcagacgttttgcaagatttaaaatcaccgttatagtgaattctgcaacagataaggtcgtcgtgtccggtgaataagtcgtataaatccctaactcattcgcagccttccagtcaagattgtcatatcctgccccatgtctggctatgattttcaggttctttcctgcttcaagtatctccttgtctacttttgcagttcgctgaatcattgcatcacatactgcaatatcattttttattgattctttgtctgtctttccgctgccgcggactatctcatagcctttttctatgagatagtcctctcccgctgcagcgattggctgaggaatgtaaatcttctgtttcattttccactgtcgttctccttatcttacaaggcaaggtttctttggatcgaatttccatcccggaatcagatactgcattcctactgcatcatctcttcctccaagacagttatcaaggtacagctgatgtgctttcttcacctgctcaagatccacttcaataccaagtcctggtttctttggaacttctacgcatccgtctacgatctgaagtggctcttttgtcagtctttcaagaccttcctgccagatccagtgtgtatccagtgcattgtactctcccggaactgctgctccaacctgtgtaaacattgcaagggagatatcaaaatggttatttgaatgagatccccatgtatagccaaaatcatggcacatctgagctacacgtacagaaccactcattgtccagaaatgtgggtctgcaaggatgatgtcaactgcctgagattccagagagtgtccaacctgtctccagtctgtagcgatcatgtttgttgctgtcgggaaacctgtacgtctgcggaattcactcataatctctcttcctgaataaacaccttctgctccgcatggatcttcacagtatgtaaggattccttccattccctttacatattcaactgcttcttcaagaagccatccaccatttggatcaaggtcgattcttgcgtccggaagtgctttcttcattgcacggatcacatccatctcttcgtttcctgcaagaactccacctttcagtttaaaatctttaaaaccgtatttctcttttgtagcaagtgccatttctacaatcttatctgctgtaagtgcttcctcgtgacgcagacggtaccatgcacaatctgaatccggctctgaatcatacggaagatctgtcttgttacggtctcctacaaagaagagatatccaagcattcttactttatctctctgctgtccgtctccgagaagttcacaaaccggaacaccaagctgctttccaaggagatcaagacatggagcctcgattgctgtaattacatgaactcctgtacgaaggtcaaatgtctggtttcctctgacatcttcctcacccttagaatcaagatgtgcttttactttaagcagtgtgctcttatactcagcaacccttgttccttcaacaagcgggatacattcctcaagtgcttttgtgatcttctctcctcccggaacttctccaactcctgtctctccgttttcatcataaagaacaacaatatttcttgtgaagtatggtgcgtgtgctccacttaaattcagttccatacagtcttttccggctactggatatacttccatttttacgattctagacataatgatttctcctttatatacacgaactatttttctattctacttttatttttacttcagtgatcggaccggagattgacttacagtccgaccaccgaaatcatggcagcaaattttagtttattaacattttttaataacgtcttgttttaaacaagattcatatctgcaagtactttgtgcagcttctctttctcttccggtgtcagttcaccgatcgggtccaggcattttcctaccggaattccttcctgaacgagaccttccttgattgctgccgggaatgttcccataccgcatgcaatacggaacggagccagtgtaaactgtgcttccagagctccttcaagatctcctgcaacgtatttatcatagatatccgctgcaattctcggtgctacatttgcacaggatgcgattgctcctgttgctccgtagcaaagagctgcgtagatcaaagtatctcttcccatcagtacagagaaatcttttcctcttgtcagacggatatactctgcagcatttgtcatgtcacctgtactgtcttttacagcaacaatattttcaatatcagcaagttttgcaactgttgccggtgtaattgtcacatttgtctttggtttattgttatacatgatgattggaagtgttgtattttctgcgattgtcttatagtaattgtacaactcatcctgtgtctgggatacaaacatcggtgtcagtacggaaactgcatcaactccgacctcctcacagatctttaccagtctgataactcctcttgttgtaatatggcttgctccaccataaaccggaacacgtcctgctgtctcatcaacgactgtctcaaggatctttctgtatgtatcatcatcgaatgcgtagaattctccggttgttccaagtgggaacaaaccgtgaactccgttgtcgatcaggtgatttaccatctgtcttaataccggatagtttacttcaccctcgtctgttaatggtgtaataattggagggataattccctttggtacgaatgtcataataaaaaactcctttcaatttataacacaaactgtaataacagtaattctataattccaactcctgccatgatcaatgacactgctgttttacatcttacctgatcttttaattctgtcagaccgaacattccattgaatacccagaatccgctgtcattaaagtaggagaaggaaattgctcctacacaacaggaagctgcgagcaagattggggatacactgatagctgccatcagtggtgctgtcagggatgctgctgttgtgattgctactgttgcagatccaagcgcaattctcatcagtgctgcaatgataaatggaatcaggattgccggaagcggaagtcctacaactgtctctccaagaacatttccgataccgctgactttgattacatttccaagagaaccgccggctcctgtgatcagcatgataatacctgtatctttgattgctgtatccatgataccgataacttttttattatcttcttttcttaccagtccatagattgcaatgattgttccaacgccaagtgcgaagattggttcacctacaagactgatgattgtgtttgccactccttcacctgttccaaacagtccccagaatgttttaacaaaaatcaaaacaatcggaatgataatcggaagaatagatgctgtgaatgatgggagattcttctctcctaccagtttttcaacttcttccatggatttgatatattcttttttgaattcttttctttcatatccatgtccattttcattcggaatctgatagattttctttccaatatatttacagtagaatactacaacaatcagcatcggaatagagattcctgctccgaccatgatcatctgtcccacatcaactccaagcattccggctgctgtcagcggtcccggtgtcggcggtaccagacagtgtgtcagctgaagtccacaggccagtgacagtgcaagtcctacaacagagattcccgttacagaggacattgcttttacaagtggtgcaaaaataacgatcgcagaatctgcgaataccgggatggatacaacccatcctgtgattgccagtgcccattcttcttttctcttaccaattacacggatgaaagtaaatgcaagctgttccgctgctcctgaaacttccaggattccacccatcataactccaagtccgattatgataccggtacttttcaatgtgtttccaaatccatctttaatagcggtcataactccgactgtcgtttctccggctgcatttgtaatatctgcaaccggcatgcccccgatcaagcctgtgatcaatgctgcgagcaataatgcaataaatgtatgtaccttcgtcttcataaccaggacgatcattatcgcaattccgatcaccagccccagcatcattctggttgattcactcatagttcttacctctcttaattctttttctcaacagatgtatcagaaatcttctcgtaatattttacgattgcactgtgatcatctttttcatttccgtctgccttaagtgactgcataatctccattacctgtgaagtaagtggaagtgctgcatttactgcatgacctgcattcagtgcgttattcaggtctttgatatggagttcaatacggaatcccggcttgaaattgtgtgccatcatcattggtgcttttgcatcaagcactgtagatcctgcaagacctccgcggatagctttgtatacaagctccggatctgcatcatttttcactgcaagtgtcagtgcctcagacactgccgcaatattcaatgctacgatcacctggtttgcgagctttgctacatttccggatccaagttctccgacatacactacagatcctgccatcgccattaataaatcatagtatttgtcaaagttctctttgcttcctccgaccataacagaaattgttccgtcgatcgcctttggctctccgccgctgaccggcgcatccattaagtcaattccctttttgttcagctctgctccgatttctttcgactgtaccggatcgatcgaactcatatcgatcacgatcgttccttcttttgctgcggaagcgattccgttttctcctaaacagacttctctgacctgaggagaattcggaagcattgtgatgatcacctgacagttctctgccacctctgccgggcttcctgctgcctgtgctccctccgctgccaattcttctacgcttgccttgcttctgttatatacaacagcttcatatcctgctttcataaggtttctgcacattggttttcccataattccaagtccgataaatccaactttcattgttcttctcctctcagatttctgatattttgtactactgctatttcaacttgttcctaatcgtctttgataatttgcgcgcttcttattgcctgccttgcctttggtcaggtaacttatctatctgacatgcatattgtacaaaactgagtacaaagattccattgacagattgttcaatggagtgtgctctgatttatgtagatttcataagttttcattttttgaattgtgtatttcatttttatttcattatgtttcgcttctgttttttcttatttgtttcaatttcaatttctttccattcgtttcatcatatgtaatcattttttcattttttgaaacattatgaattctgcacaaattctcacttcatttttatacataacaaaatacagtttttcacataaaaaaaggagacagttttaaactatctccctgtatacatttacctgttcctatagtaattcatttcccccataattggcttctattccatactttttcattcttctccagagagttgtcgtgctgataccgagctcttctgccaccagtttccggtttccgtggaaacgttcaagcagctcctcaagttcatctgtctcctgagaacgatacacaagaatcctcttctctccatgagattcttccacatgcggaaacagttcgtcatataaattttgaagaacgacttcatcaatcatacgttttttggctgtaagaacaagtcgttcacaaaatgaccgtagctggatcccattccctgtccacttcagctcctgcagcttcttatatgctccttctgttacgctaagcggacggttgtatttttccttatatatcttcaattctttatcaaaacaatttttcagatcctccgggcgttcattcaatgaaggaatctcaaataccaggctctgcagcatataatataattcctcgctaaactctcccttttccaccagatgtttcagatttatctttgatgatcctatgattcttacatccaacgtgtcaagtggctgtgcatctgttctcatctgcgccctgcttaacattgtacgcaaaatctgatgctgtacacgcaaagtcagatgctcgattcctttaataaataaggttccgtgatttgcctttatcattgcaccctttgcaccaaaagttgaaactgtatctccggcttctcttcggaaaagctcttccatctgatgttctttatccattccccgcatattaatgctgacatatggacccactttgcggatactattattgtgaattgcttctgccaaaagataatcctctgtacctgcctgcccataaatcataactgcgtgttcagacaaggcatacattttcgcagtttcaagcatttttcgcatctgtgcattctctgtctgaatatcttcaaatttggtctgcgccgcaaatccatgcagcagcatatctccctggatatccttggtcttttttgaattgtctgccagcttctgaagagacaaaattgctcctgtaatctgattgtcatactggattggtgcaatcattgccatccaggtctttttcctgacagaaacagaagtggaatagctttcgctctttccgcttaaaatattctcgatcaagagcgaatcgattccggggagaatctccgtcaggctctttccaaccagatcttcactattctttcctaacagattttcaaccagtttattgactacaatcacttttccttctgcgttcaccttgataattccattaaaggacgtatccagtactgtttcaaactgcgcagtattacgcttctcactttcagctgcataggacgcattcttcgctgcaagaagggcttcttttagcgattcttccgttgattgataaaacagcgtcgaatatcccatcgtttctgctgctctgcaggttccttctccaccaatgatcagatccggtctttcctcaaaatctgcaataatgctttcagcctcttcaatacgttttagataaatcacatccagtcgtatatcaaacagctgctccatatacgacatatcacagagcatattttcaaatgcgatcaatgcaatatgtggatgctctttcttaagaatcgtctttgctttctgaatgagcagaccaatctcctgtgcatgaaaacgaatctcaacaacaggaatatttgtatattctttgatcagcttcgcctgatatcctctggctaccagaatatgagctccggcttctactgcaactcttgctttattcactgcatcaaccgtatgcacggcctcaagatagaccacatccagatgattttcttctataatttttctcgccggttcgaccatcctctcttccgggagaagcattcctattttaaccataataaatgcctccgactataattcattttcttttaccttatcacgcacttcactattttatcaacaagtttattccatgctattataaaaagaaaaagaatcttctccgcagcattcgggacaagattctttttctgttcgtgtatttgccggccgcagcacgctctgcagccagctctatattctttttaggagacttagattttttcaaaactttaggtaatcggtgccggattaaagatgcacagatcattatggagtttatatttttctgcaaagctctgatcttttccgcttgcaactgcaataattttattaaataattctgtaccgatatctgagatctgcgcttcgcctgtagcaaccggacctgcattgatatcgatcagatcctgccacatctctttcatctcatttctggaacagactttgataaccggggctgccgcaagtccataaggtgttcctcttccagtcataaatacctgcaatgtgataccggaggcaagctgacaaggtccgcatacaatatcgctggccggtgttgctgcatagataagacctttctttgatgggcgctctgccggagataatacttctacgatcggtgagcttcctgattttgcaatcgagcccattgctttttctacaatattacagagtccgcctttcttatttcccggagttggattggcacttctgtccacatttccttcctcaagataatgatcataccatttcatttccgctgccagtttgtcacagacttctttgtctacacagcgctccgcaatataatggactccatcacgtacttctgtaacttctgaaaacattacggttgcacctgcatttacaagcatgtctgctgcgtatccggcagatgggtttgcgctgacaccagaaaatgcatcacttccgccacactgcatcccaatgcaaagatcggaaagtggtaatgtttctcttcttctctgttcaagaattgcaagtttcttatctgccatctccataatcgcattcaccatggcatcaaagcctttttgttcctgaagaacaattacattttccggggaaatatctgcctcgtccagcaatttttccactgttaatttctcacatccaagcgcaacaaccatcacctgtccgccaaaattcggatgatgtacaagattgcgcagcgcacggatcggcaccttcgcctccggtgcattgattgcgacaccacatccatacgcatgattgattggaactacgtcatccacatgcggatattttggaagcagttcttctttgattctcttcaccgccacattaagtacaccggttacacactgaaccgttgtgctgattccaagaatatttctcgttcctgcatatccaccatttggattcctatatccttcgaatgttgttaccggcggtgtcggaagatctgttacaatcttttttccatactccatatcatcaacagacggtggtgtcggaagttctaacataaattcattgatccagtctcccttttcaatatcttccagggcatatcccagaataacaccgtaacgaatcaccggctgtccctttgggattctctcaagtgctactttatgagcctgtggaatatcctgacgggtgaccagatcctctgaaatctgtgttccggctttgatttctttcactgcaattgcaacattatctgcttcatttacttttacaagaagtcgctttgccatgaatgattcctccttttcgcttagcaagaaatgtttcatttttctttgctgttctttatagctttatcatacgctcttactattaataagtaaaattcattgtttttctacttctcttaatttttttaatagtttttcttgtcattccatatcggtcgaattatactggaaatagaaatgtaaagactcattcacagaatcagcagaaaggttattcctatggatttaaaacagattgaatatattttaaaaattgcagaagaacaaaatatcacccatgcagccgaaaagctattcatcacccagtctgccctcaaccagcagcttctcaagctggaaaaagagctcggtactccgctattctatcgttcccggactgactggcatccgacccctgccggagaaatttatctcaacgcagcaaaagacattcttcttataaagaagaatgcctacaatcagattcacgatctctgcgaagcacagaaaggtcatatcactctcggattcactcccggccgcggaattgccatgttcaccagtgtttaccctaagttccacaatatttgtccacgtatagaagtggaaccgattgaacgcagcgttcgtgatcagcatccacttctcttatccggtgaacttgacctcggttttatgactttgaccaggtcgcagcaaaaatcaggaatcatctatgaaacactagcttcggaagaattggttcttgccgttccaacaaagcttgtgactgctttagatatgaggaacggcgatctggcactgctcagagaagagccttttgtcctcacgcagaaaacctctaccatccgggagagcgttgattccatttttaaaaatgccggattcacccctaatgttctgttcgagacttcaaataaccatgcgatcatctccatgatccatgaaaatatctgctgtggaattttaccgatgtattatatagatccggaagatgaggcaattacctattttcaattacctgaccatccttcctgggagattgttgctgcatatcgcaagggacattatatcagcaagccggcgcggacactgatcgagcttgcgggaaattatttctactcttgtcacactctgcatgcagtgctaaaataagcgcagaaactcaaacacatacaacaggctcagactttcagaggtgatataaatggaatcaaagatagaaaacagaatcaacgaatgcatttcacatctagacattacttactcttatcagctggcaaagcagatggagactcacaaaaccaatccggtactcggtttccgaactgccggttctgatgcggaacataagacaggggattttttatatgaagaaatgaaacgcatcggacttcagaatgtgacgaaggatgaattttggctggattcctggacctttgaacgtgctgtgctccgtttccaggatcaacatggagaactgcatacttgtcagatgggtgcttatcagacgaattttgagacagatggattcgagacttatgatcttgtctatgtcggccgtggaaccgcatcggactatgaagggctcaatgtccgtggaaagctcgttcttgctgatatcaaccagcgtgatgaatggtggatcaactaccctgtctatcaggcatatttgaaaggtgctgtcggactgattgctgtccagacacagggttatgctgagattgatccgcgggcactcaacgctcaggatatcgccggaccggaatatgcccctgcattctctctttcgagacaggatgcttcttatttaaaagaacttctctgtcccgaagatcctgcagtatctcatccgtcctctgtcgcagttgaactcaacgcctcttcctgggttgaacgtaaccgcccggcttataacattaccggatatcttccggggactgccgcttctgaaggggacgaccggatgattctgctttccgcacactacgattcctattttgacggatttcaggatgacaattgtgcggtctctatgacatttggaatcataaaggctctgattgacagtggctatcaaccgcgctatacaatcgcagtatgtgcccttgctgccgaagagtggggtgtctgtgattctaaattcgactggtcaaccggagcctggaaccaggtattccgtgttcacccggaatggcagggccgcgtgatcgctgatctcaactttgaacttccggctcacgcccataacacacaggatgcaatccgctctacttatgagtctgctgattttctgaaacatttttgtgaaaatataactgttccgaaggaggcttaccctgatggactgacagtacttgcaccaatcgagacatggtcggatgatttttccatcgccatctccggtattccatctaccgtaaatgatttcagcgcaggaccgtttatggaaacgcattaccactcccaatatgacaatgaagaattctatcaggaagcagtttaccgtttccaccatgagctttatacaaggcttttagttacactggatcagctgacacttccgccacttgacttttccagacattttctggcaatgaaaagttccgtcgccgactgtcttgcagcacagtccaatgccccggcagaagtattggaagaaattccagcgcttctggaaagtatttcaaaggtatgtgaatctgccgatttattatatgaaaagattcaggagatcaacaaccatactgtttccgctgacttcccaatggtgtccggactttcttctaaactgctgcacattttccggaagatgcaggactacttcgtccgcctcgactggcaggacgcagtctgcttccctcatgctgctgccagtcagaacctctgtcacctggagcaggcagtccatgcactggaaagccagaacatcaccgccgcactggaggcactctatgaagttgataataactgctacgcatttttattcgatgaagaagtctattatcactttacggaatatattttacatcagccaaaagaccgtctgatgtggggcgccggacgcattcttcaccatgagaatctctacggccttgtccagcgtctgaaagaactggatcagatggcaatcccaggttctcttgatgttgagatcagaagacttgaagccgctatccgccgtcagcaggcttacttaaaagatgatctgcattatatgaaacaatctgttgataaaatccaggctttgataaacgattgccttgaaacatcatcacattataataaagaaaagaatggagaaaaccaatgaatagcgataagctctacaaagtacaggaacaggatcttgaccgccttaaagaaatactgactgtctgctttcagaacgacccgctctacagcactctgattgaagatgaagcaacaaaagaacgtctgctgccacatcttcttgagtgcgacgtaactgaattatttgaaacctgtgaagtctttgctgacagtcctgagttgaagggagtcctgatcctttctgacgaatccgatcaccgtcatgcattttataattattttgtcagcctgaaagaaagcctcatcacagacggctggctgctccacgaggatccgactatgaagacatttttcaactttgtcctcggaaaagattacctcaactccgcttggaccgcccagcttcatgaaacccgaagacttcatgtcatctacctcgccgttgatccgaaatttcaacatcacggtctcgcagaaatgatgatgaatgaagtcattgcctgcgccgatcgcaatgatatgatgatttctcttgagacacacaatccgaaaaatataccattctatgaacatcttggattcaagacattcgggatcgtggagaaacctcattttcagttaaaacaatattgtatgatcaaagaattgtaaatgttctgtacacctgttctgcagtatctgccaggtttctcttagcgttttcattcttcattgcctcttccaacgtaaccacaccacgcaggatagggaaaaatgcatcaatgccatgttcattacattttctggcatctctttcgactgcgcctgcaaatgcaagtaccggcttgccgtatttctttgcaagtgcagccactccaaccggagcttttcccatcgctgtctgaccatccatccggccttcccccgtgatgacaaggtctgcatcctttacatactcttctaactgtgtctcttccagcacgattttaattcctgattccaacacagcatctgtaaatgtgagaaatgcgaatccaaggcctcctgctgctcctgttccttcctgctttgcatctgcctttgggaatttttctttcgccaatgatgcataatatcctagccactgatccatctgacagatcatctccggtgttgcacctttctgaggaccaaacactgcactgcatccctgttctccgcaaagagcatttgttacatcacacgcaatcttaaacttacactcttttaattccggaagcacataagtatctgtgatttcctccaaaaccttcaacccctttgcaccaaatggaacctgatttccgtctttgtcaagaaaaccgtaacctaatgcctgaagcatcccgactcccccgtcatttgttgcacttccgccgattccgacgagaaaacgtctgcatcccttgtcaatcgcatcacgaattacttctcccacgccatatgttgttgtattcagcggatttctctcttcatcagaaaccaatgtaattcctgctgcccccgccatctcgatcacagctgtttttgtgctttcaatgataccatactcacagatcaccggttcgccaagtggtcctgtcacctgtactttctgtaatgttccgttcattccggatacaagagcctctactgtaccttcccctccgtcagctaacggtcttacaatcacttctgcatccacatccactctttggattccctctgccgctgcctgtcctgcttccatagaagtcatacttcctttaaatgaatcaatcgctgttactattttcataatgaactcctttccatgtctgttccgtgttttattaatattaggataccaaatttcttgtttctcaaatatgttacatgtaacattattttaaatttattctattattatttgttatatataacattttatagtaaaatggtaactgttcagagccaagcaaaatttcataaaacagatgtaaaatgattgcatttttaagactgtttttgaaattttatttggcggatacgccacaccgacgaaatgcgtagcattttgaaggttggctctgaacagttatgtcaaaagaaaggatataataaaaaatctatgataactaaaatcgaccgcgaactcgcagaacaaatcgtaaatacaatcaaagatgtctgtgatcatgacatcaactttattgctccatccggtatcattctcgccagcacagactcatcccgtgtcggaacctttcacgagattggacaacaggtcgctacttccggttctgtactggaagtaacagaagacaacaatttttccggcacaaaacagggaatcaatcttccgctttatcataatgaacatctgctggccgtcatcggaatcaccggtatacctgataaagtccgcagttatgcttatctcgcagaacgcatcaccaatcttctgattcgggagcaggaactaaatcagtacagccgcagacaggccgataaaaaacattttgtcattcagtctttgatcagaaatgaaaccgacaatcaggaatacctcacctcctgtctacatgaatttaagattgatctcaacacaaagaaaagaattgttcttattcgcacaaataagcaaaatccaattacaaaccgctctattttagaacagaaaattcaacaaatgtttgcacaggcacatatctgtcttcacacatttaattatccgggggattttattgctttgatcgaagaaactgattttgaaaaacagaattacatttttaaactctttgcaaaagaacatttcgatattttagatattgcagttggaaaaccgacatcactcttccagctccatacctcctatcaatctgctgaaactgctttgcacagccttataatttcatctgaacactatgttatttttgatgatttgacactcgaactgattctttctacgatcacaccggaaaatcagaaagaatttttagccaagacaatcgccccgctcaatgaacaagaactgcacctgctagaagtttatttttctgaagaaatgtcccttgccgccacaagtgaacgactctttctccataaaaatacattgcagtataaattgaatgcgattcaaaagaaatgttcactgaatccgaggaaatttcaggatgcggtgctgctttatctggctgggaagattaaataaccatacaacttgattttagctggggtaaaaatataccccagcacaatcttgcgctttcatctcggtaattgaattgccgaggattcccgcttattgtcctaaaataatggtttttgttttcggataggggaaatagcatatatcagggacattttgagtagttaaaggagagtctatttttagaggattctctccattggagtattctgcattatattcttttagtgacaaaaaattatcatctgttggttgtgcagagtatgttttgttataacttggaattgataggtaatcttgagaatttgtttttagaggattttctccattggagtattctgtattatattcttttagtgacaaaaaattattatctgttagttgtgcagagtatgtttcgttataacttggaattgataggtaatcttgagagtctgtttcgtgtacatatattgtcatggcagatgataaaagtaataaaactgcggaaaataaacatataaccttcttcatataatttcccctttcaataaaaaatttgatttgattttttatgatttccagtggaattacctctcttttaacaataaaatattgatttgcacaattaaaaactgtttatatatataataatagtagtattttctgtgaattgtcaatgggatttaatacattgaatctatcaaaaataatatagcaaggtgagaaagaatccctccgttaaatctttactccccctgtttcactttctgccaacatgtgctataatcgtaaaagcatgaatgttgcttatcattatctatacgcagcagacaaataagaaaaagaactagaacagaataaatcatttaaggagtataaaattatgaaaatcattgtattagcaggaggcttaagcacagaacgtgacgtatcactttcttctgctgccggaatctgtcgtacattagttgaaaaaggacatgatgcatttcttctggatgtattcatgggattagagaatgcgccggagaatctggaggatgtctttactcttccggatcacgggcttgagattgtgaagaatatcagcacggaggaaccggatcttgaagctgttaaggcttcccgtccggatcagtcagactgcttcttcggcccgaatgtaatcgaactttgccgtctggctgacattactttcctcggtcttcacggtggagaaggagagaacggaaagcttcaggcatctttcgatctgcttggtattaaatatacaggacctgactctcttggatgtgcggttgcaatgcacaaaggtgttgcaaagcagatcttccttgagtctggcgtagacactccgggaggtggaacgatttataagaactctgaagatcagtcttaccagtcacttggtctgacacttcctgttgttgttaaaccttgctcaggtggttccagtatcggagtatatattgtaaatacagatgaagaatatgcagaggctctgaagaagtccttccgctacgaagatgaacttgttgttgagccatacattaaggggcgtgagtttgcatgcggtatcattgacggaacagcacttcctccgatcgagatcatcccgaagacaggattctttgattatgcgaataaatatcaggacggagctacttctgaagtatgcccggctgatattccggaagaagttgcagagcgcatgaaggaacttactgtaaaagcattcaatgcactgaaacttaatgtttacagccgtgcagacttcctgcttgacgctaaggggaatctgttctgcctggagatgaatacccttcctggaatgacttccgcaagtcttctcccgaaggaagctaaggtttatggaatcgaatacggcgatctttgcgaactgatcattaagaagtccatggaggcaagatattaatgaaacatatgacattatctgaaatcgcagatgcctgctgcggaatttattgcggtgatcctgcattcttagactgtgaggtctcaagtgttgcgatcgacagccgtaaagtagtaaaagatactcttttcgttgcgatcaaaggtgcccgtgttgacggacacagttttatcccgcaggtcatggaagcaggtgcactctgttccctctctgagcaggatcttggtgacgttgattatccttatatccgcgtttcatcctgcacagaagcattgaaagacttagctgaacactatcgccgttccctcgatatcaaagttgtaggtatcactggaagtgttggaaagacaagcacaaaagaaatgatcgcatctgtactttccgagaaatataatgtactgaaaacagaaggaaacttcaacaatgagattggacttcctctgaccgtattcaatatccgtgaggaacatgaggttgcagttcttgagatgggaatcagccactttggagatatgaaaccactggctaagattgcccgcccggatgtgtgcgtgatcactaatatcggatatgcacatcttgagaatcttggaacaagagacggaatcctaaaggaaaagagttccatgacagactacatgaatccgaaaggttctgttatcttcaacggggatgatgataagctgaaaagctacacttcccgtgatggaagaactcctgtttacttcggtcttacctcttcctgcccgttccatgtggaaaatattgaacgtaaaggattaaaaggaacgtacgctgagtttgttactccaacatcccgtttccatgcacatatctcaatcccgggagatcatatgatctataacgctttagccggagttgctgtcggatatgcgcttggcatgaataatgatgagattgcacgcggaattgaaaagctcattccgattgccggacgtaacaacctgattgaagcaaagcattacacgatcattgatgactgctacaatgccaatccggcatctatgaagtcctctcttgacgtacttgcatatgcagacacaagaaaggttgctatccttggcgatatgggcgaacttggtgccgatgagcttgcgatgcaccgcgaagtcggagcatatgcagcatttaaaaacactgatgttttggtctgcatcggagccctttccaaagatatggcagaagctgcaaaggaaactgttcttgcaacagagaagaacatgaaagttttccattttgacacaaaagaagacttttaccagaatatgggacagattctcaaagaaaatgatacgattctggtcaaagcttcccactttatggaattccctgagattgtgaagaaactgtcagaagaagcataagctgaaaccacactgaaaatatacgtcagtctttaaaaaagagttgaaacttctgcctggatcattctagctgattcaggcaaatggtttcaactctttttcagattctattatcttattctacttttcactctatcccgagtgcttttcctaccatctggaattctccttcataaatgcagttcggcagggtaccatccacaatacccttcctgcattcttcgaaatccatccagatcacttcttccacttcagattcctgtaatttcaaatttttaatgtccactggttctctataaagatatacggtactgcgttcattgtcacggaatggttttccatgaaattcagcttcaaactgtcctctgtgtgttccgataaactgaagctgatcttctcttgcatgaattccaagttcttctttcatctcacgcaatgcactttccatcaattcatccccggcactgacatgccctgcggaagaaatatcatacgatcccgggttcgaatctttacattcacttcgtttctgaaggagtacatcataaccactctcctgattcggacgtacaatccagatgtgtaccgttgaatgcaatgttccatctctatgtgcaacaccgcgttctttcacctgtccggttttatttccatcttcatcaatcacatcaaaaagttccatcggctttccgttgagtgccacatactcaagcacatcagatttattatacacaagctttaaagagaaaaattcctcttcttcgtccatcagacggaagaaaatcttgtctccctcccatagattcaggtcttttatcttttctttctccacccattcaagaatcccctcgtcacattcgatcggatcacctgtaaacccgtctgctgtatacagtgacatatattccactacatcttctccatatacaaatgtcacgattcctctgtatttccaggaagtcaatgtataaccagtctcctctttcacttcacgcaaaaggcattcctccggactctctgcatattcaaaatgtccgccgacgccgatccatttatctttattcacatcatttttcttcactactctgtgaagcatcagatattttctgtctttttcaatataacataatgtgctttgtctgttcatcgtacttctcttttctttccactttctttatgtctgatgcaggtacacaattgcttaacctgcagcttttatccgcttgaacccaacaactatgagaaacacgctctgcgagtttctcaagttatcgcggcagtcgccaaggtctcgtgcaagcacggactttggctcgttgctcgcgtaaattatagtatgttactgttcacacagtgtgcgaccagtaactacagtataacatatttcttcatgaatcgaaccttatcttgtaaaccgtgcgcaactaaattataatgatgttatctatggaaacgatgcgttgctgattgcacgcatgtgaaccgcagcaacaattcaatgggggatattatttatgtggtcaagaaaagatctcaagaaaaaggcgcgtattttaataaaatcaaactattggagaagtgtgtctgtctgctttctgattgcaatgctcacagcttcgtatccaatttcccgctctttatttttaaattatttttctgataagattcagacaaagacagcgcttattttacctgtttttatttctgctgaaagcttcagcagtgcatttctcgattttattcctgataatttcatagccgctgcctttttacatacggttcaaaattacctgaagcgtccggactttatcgtcacttcgtttcttacacttggagtcattttttcacttttatataagttttttgtcagtaatcttttgattgtcggtgagaaacgtttttttgttgaatcttataactatgaggatacgaatatttctaaaatattctttttatataagttgcgttacctggcaaatccttcctgggtgatgttctgctacacgctttttcagaaactttgggatttaacaattatcggtggaattattaaacactatgaatacagtatgattccgtatatcctcgcagagaatccgaagatcagtcagaagaatgcattctttctctcaaagcagcttacaaagggaaataaatggaggctctttttgttagattgttctttcctcggctgggagcttttatctctctttacacttggaattctggacatcctttatgtccgcccgtacaaaatgaactgtaaagcatccttatatctgtttttacgaagaaactatgtgctttcaagagctcctaaatatgagcagctcaatgattcttatcttgagcatgttccttctgaagatgaacttctgattagtaaagcactttatgacgattctgaaggtccttacacaaagatctcttattttgcaccgcatcagtatccggtatttcttttttctgtgcaaccacctattgctgcagtaaaatcaccggtcaatccggcgcagaattatgactttctatcctgtgtatttttattccatgccttttctattttcggatggcttctggaaatcatttccgaattgctcagttgcggcacactggaaaatgttactcttaagacactcccatggctcccgttgtacggaatctgtgggctgctcatactgttgctgttaaagaaatatatcaagaaaccggctactatgtttatcatcaactttgttgtatacacggctcttgactatctcgttcagctgcttcttgattttggttttggaattgaacttccgaaatatcattcttaccttactttcatgaatggagaagcatatttgggagacggagcagtattcgcacttcttggctgtgcatttttctattattttgctccacgctggaatagtctgttcttaaaattaaagaaatggatgagaatttcaatttgtattcttttgacagcaatttttgtatttgaccttctatcaggcataatccaatattgattttactgctaaataatagtaaaatcttaattatcagtaaggttggttttactgttgtgattttttctaatacagtatgaacctgttccccctgacaaactattacagcttagaagaaagggaaatattatgaaaaaaagagtcgttgttgcactgggacaccgtgcacttggaactacacttccagaacagaaagtagccgttaaaagcactgccaaatgtattgctgatctgattgaagcaggctatcaggttgctatcacacacagtaatgctccgcaggttggtatgatccacactgcattgaatgaatttgcaaagaaccatccggaatatacagcatccccaatgtctgtatgtactgccatgagccagggatatatcggatatgaccttcagaacggaatccgtgaagaacttctcaaccgcggtatctaccgtacagtcagcacagtcctcactcaggtgatcgtagatccttatgatgatgctttctatacaccaacaaaggttctcggccgttatatgaacgctgaggaagcgaatgaagaacgtaagaaaggcaacttcgtagtggaagaacctggtaaaggtttccgccgtgctgtctctgctccgaatccggtcaagattgttgaacttgatgcagtgaaagctcttcttgatgcagatcagattgttatcgcagcaggtggcggcggtattccggtacttgagcaggataatcatttacgtggcgcaagtgctgttatcgagaaagacctcgcagccggaaagcttgcagaaggaattaatgctgatcttcttattattcttacaaatgttgagaaagtatgtatcaaccttggcaaaccgaatgaggaaccactggatacaattactgttgatcaggcaaaaacttacatggaagagggacattttggaatttacaacatgcttccaaaattccgtgcagcagttgaattcgtagagggacacgaaggccgcaaagcttacattacttcctttgataaagtctctgatgctctgaatggtaagaccggaacagtaatcgaatagattgacagattaaacttattagaaacataacctggaacaggccgtgatttcacattttaattttgtgaaatcacggcctgttttttactttccatcacagatttctttcatcctgtttttttgtggaataagatacttttaatttcaaaatatctcttgctttttcataaatatgtgctatagtatatatatctcttggatgtagtattaaaaactacatgttattatatagatgtatcggaggtagattttatggaaaaaagactttatatcaaagaacctggaagcgcaattacacattttattggaatgatcatggcaattatcgctgcaataccacttctatacagagcagctcgtgaaccgagcaaactttatattgtatcgcttacaatttacgcagccagccttatcttgctttatgcggcaagtacaacatatcatacatttgatatttcagaaaaagtaaacactgttctgaaaaagatcgatcacatgatgatctccgttctgatcgccggaagctacacacctgtctgcctgttagtaatcggcggacgcaaaggtatcacactgctatgtattgtatgggcattcgcgattgtcggcatccttatcaaagccttctgggtattctgtccgaaatgggtatcttccgttttatacattggcatgggatggacttgcgtgcttgcattttctacaatccttgataatctgtcagctgctgctttcggatggcttttagccggtggtatcatctatactgttggcggtgtcatctacgcactgaagctcccgattttcaacagcaagcataagaatttcggaagccatgaaatctttcatctgttcgtaatgggcggaagcatctgtcactttatagtaatgtatacattccttctaccgtaaatataatttattgaaacgaaaagaagaaggctatcaactacgctttgaactgctccccgtcaagtagacaattgaaaaaatataaatttttcctaccagcagaaatttatctgctggcagtttttatgcagcttgcaagtaaatttcatgtttttccattggtgttaaaattccaagattcctttgcaaacgtttgttgttgtagtaatctatataatcttcgatcatttttacgagagtacttctatcagtgaatcgttttccatagtatcgctctctcttcagaattccccaaaacccttccattggtccattgtcgatacatttagcaactcgcgacatgctttgtattattccagcatttacaagttttgtatgaaatgtcctgttcgtatattggaaccccctgtcactgtgaaacagtggctgcacaccaggatttccaagtaaagcattgtctatcgtatcaaacaccaaagcattgttgttcttatcacgaataacatacgaaacaatccgtctatcatatagatccagtattgcacttagataaactttatgcttttccattccaatataataatggaattctgtcacatcagtgagccatttttcatttggtgctttggcagtgaactcccgattaagtatgttttccgctatatactgagggtttgcagcctgtcttgtgcatccgttgttagaatacttgacagttgattttatattaagtttacggcaaatgcgtagtacacgtttatcgtttacatcaataccatgatatcgttccaaatcatctctgattcttcgatagcctttatccggtgagtctgtatgaatcttttctatctcgtcagcaataagcctattcttttgctcacttttaggaatttctctgtgtagccatttataataagctgctctagaaacattaccaagtttacaaagtgcagcaactgaataattatgatcttcatgttcttctttgattgcctgatatatatgttcatgacggatcaggcttagccccgcctcctctctatttcttcgagtttttttaaaaaagatgcctccatttcagcacgttctttctctgcttttaaaattttaacttcagcacgcagcttttctaattcactcatttcatcgggacgttttcgtttgccacggttatctcttaaagcttccactccaccagcttcatatttgactatataattgcgagcctgttgataggacacctggtattgttctgctgtttgggcataattacgatcatgtgcgatacaatactgtactatttcaacccgttcttcaaaagtggtttttcttcctttggtcatgacaatgcttcctcctgttccagaagattttaattctacatgaccattatacttctttatccaagtttgtaacttaccttttgaacggatcccgtattttttgcaaatatcattttgagaaccatggcctgctaaataatctaagactgcttgttgtttcaattctttggaatattttttatttcctttcaatgtgaatgcatttactcccatagattcatagtttcgaatccattgttggacagatgcaagacttacatcaaacatatcggcaattcgccgttggctttcttttccatccagatatagatttacagcatatgtcttatcctcaacagatacttttcttttagacataaaatatgctccctcctaagtgacaagtttttattatttcacttgtctacctagaagggagcatatcactttatactgttatcgtagttaatagccttcctttttcatttcgttactatttacatttcatgcgacctgcaacgtatctcactatctcgcatcataccttatcctacattgaaaactggctctcatacagatgatgatagaaaccttccttcttcatcagtacttcatgatttccctgttcaatgatttttccatctttcattacgagaatcacatcagcctcacggatggttgacagacggtgtgcaacaatgaaagttgttcttccttccatcagttttgcaaatgcctgctgaatcttgatctccgttcttgtatcaatggatgatgttgcttcatccagaatcaacattggtggtctgcataacataactcttgcaatacaaagtagctgcttctgtccctgggagagtccgcctccgtcttctgtgatccatgtatcatatccttttggcagacgacggatataattatggatgtgagaggctttcgctgcctcgacaatctcttcttccgttgcatccggtcttcccatagcaatattttcacggattgtacccgtttttaaccaggtctcctgaagcaccattccgtaccctgcacgcagactttttcttgtcatttcacgaatatctatgtcttctactttaatacttcctgcattcacatcatagaaacgcatcaacagattgatcaatgttgtctttccacacccggtcggtccgacaatcgcaatacgctgtccaggctttacttccagattaaaatcttcaatcaaatgttgctccggcagatatgagaatgaaacgtcctctattttcacatttccatcaatacccgtcagatgaactgcattttccgattccggtatctgtggttcttcatcgatcaaagtaaatactctctgcgcacatgcaatcgcattctggaattccgtcacaactccggaaatttcattaaatggctttgtgtactgatttgcataactcaagaaactggacaattgtcctacgctcattgcaccgcgtacaactgcaaatgcccctgtaattccaacccctgtgtaaaccagactgttgacaaatcttgtcgccggatttgtaatagatgagaaaaatgttgcccgcaaggatgcatcctgcaatcttttattcacttcatcgaaacgctctgttgcatcttctccgcgtccaaatgcctgaaccactttctgatttccgatcatttcatcaatcaagccggtctgctctccacgtatttcggattgcagacggaacatacgaaatgttttctttgcaataaaatttgctacaacgaatgataccggtgtgataagaaccacaacaaatgtaatcgatacatttacggataacataaaacaaaatgttccgacaatcgtggcaatcccggtgaagagctgtgtaaatcccatcagaagtccatcagaaaactgatcaacatccgcgattacacggcttacaacatctccgtatggatggccgtcaatatattttagcggcaactgctctattttatggaacgcttcatttctgatatcctgaaccatctgataggtcattttgttattacacacattcatcagccactgtgccaatgccgtaatcagtgtacacacaccaatctgaatcatcacctggattactcccgggaaattcacttcaccttttccgatcacatagtcaactgcatgtcctgtcagctttggaatataaagtgtaagcgcaacagatacagttgcaagcagaattgaaaatacgagaaaaattctgtatcttccaagtcggcggattacctttttcaatgttgctgcctgacttttctgtttcttatcactatttatctttattttatcagccattgactaccgcctcctttggaaattgtgaataatagatttcctgatagaccggacaatccttcagcagttcttcatgtgttccgattcctgccattgcaccatcatccaacacaatgatctggtctgcatactgaatagatgctgctctctgagatacgataaatacggtcggctggtttttcatctctttgattgacttgcgaagtgccgcatctgtagcaaaatccagcgctgatgcactgtcatcgagaatcaggatctccggtttccgaaccagtgcgcgtgcaattgtcattctctgtttctgacctccggaaaggtttcttcctccctgttcaatctgaaattctaatccgccttgtttcgtatcaacaaattctcttgcctgagaaatgtccaatgcttcatacatttcctgctctgttgcatcttcctttccccagcggagattgtccgcaatactccctttgaaaagcactgctttctgaagaacgacaccgatatgttctcttaggttctctgtctgatattctttgatatcacgtccattgatcttcactgtaccgtctgttgcatcataaaatctcggaatcagattcacaagagacgattttcctgaacctgttcccccgatgattcctatcgtctgtcctttctcggcacagaaatttatatcagataaggatgtatctgaagttcctttataggtcaaagatacatgagagaactctacgaccggaattttatttttcaaatcccgatctgcttcggaagaattgctcttccatcttacatctccctcattcatatctggtttcacagcaagcacactctccacacggttcagacatgctgctgccttcgtcacggaaataatcaagttcgctaacttcacaagttcaacaagaatctgtgacatataattaataagtgccacaacctgtccctgggtcagatctccgatatcaacacggactgcaccgacatagatcaatgctatgattgctccgtttacaataatatatgtcagcggattcatcattccagaaatgcgtcccacatatttctgtgcatctgtaagaatttgattcgcattttcaaaccgcttcgtctcatcctcttctttattgaatgcacggataactcttgctcctgtcagattttccctcgttgcaagaagtacctgatcaagatctgcctgcactttcttatacatcggcatcgtcacaagcatgattccaaacacaataagtgaaagaagcggaatcgtcacaacaaatacaagtgctgctttcacatctactgtaaatgccatgatcattgcaccaaatacaatgaacggcgaacgcaggaacaatcgtaaaacaagattcacacctgactggatctgattgatatcacttgtcattcgtgtgatcaatgtagatgttcctaattggtccatttccgtaaatgtaaatttctggatatgttcaaataatccatgtcttattcccgttccgactcctgttgctgccttcgctgcaaaatactgtgctgtaatggaacagacaagtccgatgattcccagcgcgatcagtacaaaacacattttcacaatatatggcttatcctgatttgcaattccaacatcaataattgccgccattaccaacggaacaaacagctcaaaagatgcttccagcatcttgaacagcggagcaagtattgattctttcttatatcctttcagatatgcaagcaatgtcttcataataccctctctttccttcctgttgttctaattgatttgttttaatcttactcgattattattttttaactgtttttccaattgttatttttttaactcttgataataatctatctcttatattatcatagaataaagcatacgaaaaatcttatttttatatagaaagcatatattttccatatactttttttattctcacgaatcaatatatattatttcgtgcattgcaccctatattcctacatgatatcaaatatataattggaggtttcacatggatttaaaacaattggaatattttgtcacagtaataaatgaaggaactatttcctcagccgcgcgaaaattaaatctctcccagccgccattaagtgcacaaatgaaatctcttgaacaggaaatcggttctcaactctttttccgcggacctcgtcagattgaattaacagaagccgggcgtattctttatgagcgttccaaggatattttagatctttcttcacgtactttacaggaactttctgactatcgtgaaggaaaatccggcgtacttcgaattggtattgtttcctctgctcatgatctgatggcacagcgcgcttttcgtccatttcatgagcaatttcctgaaattcgttttgaattatatgaaaatgacacttatcgtgtcatcgaacaactacaatccaaagttctggatcttgcaattgtacgtacccctttccaatcagataatttaacctgttacactttggttaaagagcacttgcttgctgtcggaaataaaaaatatttttcttccgatacttcttataatacaaaacatacgctttccacggatagaaaaatagctaccgctgaacccgacccaaatgtaacaatctctcttaaagagttagcagaacatcccctgattgtctaccatcgctggcttcctgttttagaccaacattttgaaacacttaaactgcagccaaactatttatgtatcaaccatgattcccgtacaggaactgcatgggcaaaagccggaatgggaattgcaattctccctgcgtcagctgctgaatcactcacatccaaaaatatcattaaaaaagtgatcaccgatccggtcatcacctctgatatctgtattctccatcatcctgacggttatctttcaaaaatcggaacatcttttcttatgcacatgatgaattattttggaatttctcactgattgctacgcacaaaaagagtctggcaaataccagactctcttaaatcattcttattatagactatctatccaacccgattctttctacctgtcttccgatacgcattgctttggcatatgccatgagacgttcttcattcttcttatcgtatcttctgtagttctcaataacaagttcaaagatatctttatcaatgtcttcacggaaacgaatgcaatcgcacacgcttctgtcaattccatatacattgtaagaaccgtactttgtatcaaacacatgcttctcatcctcaaaagcctgctctgagaagtaatgtctgctgacttcaaaattcatcttcatcttgtgacggtcacttcttcttgttgcaatcgaaaggatctccggctctttatcgatcagacccatgtaataacatgcactgtctgcgcagattaccgcttttctatttactcgcgccacttccactgctttataatcttccggtttggaaaactttggactaatgatccaataatgtccatgtgctaccttttcaagctttccttctgctgtcaacagaccaatctgacgatttgtaagtccttccttcatcaaatcttctgtatcaatataacctttgtatttgtctgcaatatgtttcactttgtcatagataatctgacgcataattcttttcctcgcttaactcgtgtattactagaaactgtaagaaatgtttacgggctgctgtgagcagcaacacctgtgattcttttaagtctctcgtattgtatcatctatcaaagcggttgacaataggtaagacgctgatttttcagtccgatacctctatctcttttattaaaaattcattcccacgaagcagataggtattttcacttccacagtacggacagattttcccatgttctaccgttggatattctttctggcattcctcacaaaatgttactgcttctatctgctcgattttcagttcggcttcttccataagcggttctttcttcttcgcccaattccagcaatcagtcagataatcatgtagaattcctgacacttccccaatctccagtgtcacggaagaaaccttctccacatgatttttttccgcaaccttctttacatcttttacaacataaaagacaacacctaattcgtgcattttccttcctctcaatttatattttttcaactatatcctgaagcaatccaatcaactcttttgcgttcacaggtttaaagatacactcattcatacctgccaactcacactgatgtatactttcggtagacgcttgtgctgtcattgccaaaatcggaatctcagctgcatctgcccttttgtctgccatggatcggatctttcgtgacgcctcttttccatccatctccggcatcatgatatccataagaacagcatcatattctctcagacccgactgtttaaatagttccacagcttcctgtccattccatgcctttatcacctgtgcaccagcttcttccagataaaactctgcaatctccatattgatctcattatcttcagcaagaagaatatgatatcctctgagtggtttatcttctttcagatcctgttttgttccctgtacacattctccactctgactttccttttccggctgaactactggaaaactcaaataaaaacgaaactccgttccaacgccgggcgtactgctcacctggattgttccgcccatcttttcgaccagtccttttacaattgacattcccagccccgttcctctgtactgcgttcttgcatcatttatttcctgtgtaaaaggcttaaacaattcttcttttatatattctttgctcatccctacacctgtatccgtaatacgaaattcgaatgccgcacacatcccatcaaaagagagttcttttacataagtgtctatccttcctccacgcttattatatttgattgcattactgaacagattcagcataattcttctgatctgcagcgtatctccgatcagcgtcgtatgatccatcttttcccgatggctttcatagctgatttccatcgcttctacctgtgcactgaccacaacttctacctgatctatcaacgcattcaaatcaaacgtatcattctgcaattctaaatgtcctgactcgattttactcatatcaagtacatcattgaccagttcactcaaatgttggacagacagatcgattttatcaacacactcttctatcttttcctgatctttataattcttacgaatcatctggatcattccgagaacgccattgatcggtgtacggatatcatgactcatccggttcatgaattctgtcttcgcacggctctcgagatccgctttttcgtatgcaacctgcagacgttctctttctctgtcttcctgctcatggaactctgaaatatccttgaacaaaataattgcaccgatcaccgtacttgtctgcttcgtcttactttcataaaccatctcctgtgacatcaggactgtctcctgccaccagcatctgcttccatcactttgctctacctgatattccacagtcacctgcttttcgcctgctttaaaacgttcgatcagctgtgccggattttctgtgatacgataattttctctcgtctcttttgtcacgaaccgctgataggtcttacaatacgtatcataaggacatggaagttttatgtctggaatctgcctgtttcccctgttttgccaaaatatcttttctaataaattctgtgtcagattaacactttggattatttctgctgtatccatcaatgcttctatatagtttccgttttccaaaatggactgcgtcagctgttcatagaactgtgtcagttgctttttctcatttacgatcaatctgtccctgtcctgataaacatcaaacccaacaagaaaatgatgcagatttccattttcagcaaagtcaggcagtaaaagtgtgatccggccacgcaaaactctgtcaccatccttgtgacaataaaaatattcctctacctgatgttcctctgtcagtgtttcccggatttccgacagctgaagtttcttccaaagttccctgcgtttctcttcctccgtcagctcctgtataatctgctctactgcaccagaataactaccatcatctgcaagaaaaaattctgagcttgcacgaagaacaacatactgatccacaatcgcatcacagtacagacaatctgtaaaatgaaatcctttttcttttacagattgtaacagccgactcctaagtctccgcttgtcagctgcttctttcagcttcgcccgattcttgtctacatacatgttcttatccgcatatcggaacaggtctttcatattacttcccggaaaatctgtagacaatgcatatcccactgcatagctaagtggcatatccggatgattctttgaataacgctccgtctgttcccgtatcatctgcagacagtctttcacctgctcatgatccacctgctttaacactgcaataaactcgtctccaccatctcttccgacaaaatatttctccggaagtgctgcccgcaattgttctgcaaatgatctgatatattgatcgcctctttcatgtccctgccggtcattaatgattctcagattatttaaatcaaacaccattaccgctgttgattcactgcccgtaagcggctcttcagatgccagaatctcctcgcacttattcttattcggaagtcctgttgcctcatccagataaaccttctgacgaagcacacggttttgcgccgcgtaccgtaatgccttgaaaagctcatatcccaacagacacacaattccaataatatccacgacaacgattttctccagacggtttaaggaagatgccagcttctgcgaataactttccgcaagccctgttgtctcatcacagattgtaaaaaatgtttcacttttatttataatctgtgtattctcatatccttcttctcgagccttatagatttcttcctttagttgttcaaaaaattgttcctgcacttccatcttatcctgaaatgctttatcatccagacggacaaggttcagtttatcgctgccatgacgtaacccatcaatatacgcatccacttccctgatcatttcatcctgtggtctctgtgcattttccagtttgatgatctgctgcgtctttccacgcacaagtcctgcataattcactacacgagccgtcccttgcatatcgctgaccaatatcataattccaaagaataatgcaatcaggatacaggtaagaagcatcatgaaaatacgcagaatccgtgtgattttcttttctttttccttcatatctttataaccttacttttacttatttaaagattataacagaatctccgttgttttcccataacaaaatacatcaccagaggatttttaaaaatggtgtaatacttgctatctgttttggaaaatgtgatactataaattatagtcacacttaattttcgtaacaaacggagggaccctctatgataaaccagacaaaacaaatattggaagaatctctgaaaaaattaatgcttcaaaagccgctcgataagataactatccgcgatttaaccgaagactgcggcatcagccgtatggctttctactatcactttaaagatatttatgatctggtcgaatggtcctgcctggaagatgcaacccacgctcttgccggcaaaaaaacttacgacacctggtctgaaggactggtacagatttttgatgctgtgtatgaaaataagccatttatattaaatgcttaccgctgcatcagccgggatcagattgaaagtttcctttttcatctgacttccgatttactgatgaatgttgtagaggaaaaagcagaagacaccagtatttctgaagaagaccggcgctttattgccgatttttataaatacagctttgtcggtcttatgctcgactggatcaaacagggaatgaaagacgattatgtcgatctggcacataagatcagtattaccatccacgggagccttacgcattcaattgaaaattttgcagcactttcagaaaaagagaattcataatctccatatataatatttcctataattatcactggaataaatgttgaggacaaaatcccccaactataacactttacaaaaaagggcaaatgataagttttttatcacttgcctctttttgtaaattgaaaatcttcaaaaatgtccatactataactataacaactatacttcatatctcgttatttgttactgttcacacgatgtgcgaccagcaacgcatctcgccattttaaatcgcctttggcgatggggcgagacatgaatccgttttttcagaaaggtggttttattatgtcaaataagaaatctaaacttggtgtaatctctgcagtagcagcaggaacaggaactgcaatttatctcgcacagaaggcaaaaaaagaatctggtaattcagaatccggtaattctatttttaagaagagtactgttgctgattcttccgttccgaataactatcgtaacacagaacgtggaaaatatgaccgcaacagcaaaggtatctattattccaacggaaactacgaagcatttgcacatccggagaaaccggaaggtgtagatcagaaaaatgcttacatcgtaggaagcggacttgcctctctggcagcggcatgtttccttgtccgtgatgcacagatgcctggatgccagatccacattttagaagcaatggatattgccggtggtgcatgtgatggaatctatgatacttcccgaggttatgtaatgcgcggtggacgtgagatggaaaatcatttcgaatgtctgtgggatctcttccgcagcattccatccatcgagacacctggtgtttctgtacttgatgaatattactggctcaataaacatgacccgaactattccctttgccgtgcaactgtaaatcgtggcaaagacgcacatacagacggaaaattcaacctcagtcagaagggctgtatggaaatcatgaaactcttcatgacaaaagacgaagatctctacgataaaaccatcgaagatgtcttcgacgaagaagtatttgattctactttctggctctattggagaacaatgtttgcatttgaaaactggcacagtgctttggaaatgaaattatatttccaaagatttatccaccatattgccggactgcctgatttcagtgcattgaaatttaccaaatataatcagtatgaatccctcattcttccgatgcagagatacctcgaagatgccggtgtggacttccagttcaatacagaagtcacaaatgttgtattcaaattcgaaggagacaaaaagattgcatctgcaattgaatgtaaagtaaacggacaggaaagaggtatcgtcctgacagaaaacgacctcgtatttgtcacaaacggaagctgtacagagggaaccatttacggagatcagaaccatgcaccaaacggggatgccgaagtccgtacaagcggtgtatggaacctttggaaaaacattgcccgtcaggatccatccttcggacatccggaaaaattctgttccgacatttccaagacaaactgggaatctgcaacagttacaactctggatgacaagatcattccttatatcacagacatttgcaaacgtgaccctcgcaccggaaatgttgtaaccggcggtatcgtcagctgccaggattccagctggctgttaagctggacgatcaatcgtcagggacagttcaaagaccaggataaagataaggtatgtgtctgggtttatggattatttactgatgtgcctggtgactatatcaagaagcctatgaaagactgtaccggaaaagaaatcacagcagaatggctctatcaccttggtgttccggaagatcagatcatggatctggcagaaaacagtgcaatctgtgtaccgacaatgatgccttacatcacagcattcttcatgccacgtacaaaaggtgaccgcccggatgttattccggatggatgtgtcaacttcgctttcctcggacagtttgctgaaactccaagagatactgttttcacaacagagtattctgtacgtactgctatggaagctgtttatggacttctcaaagtagaccgtggtgtgcctgaagtatggggaagtgtttatgatatccgcgagcttctcgacagctctgtaaaacttatggacggaaaatctccacttgagatccagctgcctggaccgctgaacgcactgaagaaacctcttctgaaactcgtaaaaggaaatgtgattgaaaaggtactgcgtgatcacaatgtactgaaggacggaatgtaaaaaagaacacttgttcttttctctgaaatatgctattctatttctacctgatcacgtaagaagaatgcctcccggcattcttcttacttaaatgatttgatacaagggtcaaaaggtcatgcgtttcttgcttgcatgaaaaagcatgacttattgacccgcaaaacaccgaaaagtagccatttttcgtagaaaaatgagcggatttgaggtgttttaggattgcgagagcatgaaatgcgaagcaatccgtgtatcataggggtcaaaataccttttgaccccaacatcatgatttcagacagcatataggagaagcagcaacacatggatggatatcagttcgaagaacagtgtgcgatcatactaaaaagaaaacatttttcaaaaatagaagttactaaaagttctggggatcaaggcgttgacatcattgcctataaacacagaaaaaaatatgggatacagtgtaaatattacacgtatcccgttggtaacaaagcggtccaggaagcttatgccggtgcgaatttttatgactgtgacaaggtcatcgtaatgacaaacacaacattcacccgttccgcgattgaacttgctgaaaaactggatgtagaattgtggccggattgcccggtcacacctttttacagtttattgttcaagatcatggaattattgaacctgcttcttttcctttacgcgatcctgacacttttttctgcaaaatatgattttattcatttgccggtttcacttgatacgatatcgctggtggcactcctgacagcctctgctttaggaatcttcggctggaagtatctcctttgtaatctgattaccaccggagctttcctcttccttgcattccatgttgcgctttcacctgtatctctggcaacagattatacatacacacaactgctctccttaattcctgcagttgtatacatgcttcatgccgggtggctgaaattaaagaagatgaaaaaataaaagcttattcaaaccagatttccggattcgtagacgatacactggttactcctgccttaagaagtgccattacatcttccttctcccggatcattcctccggcgatcacaggtaccggaagatctttacagatatttccgatcaccttcggcatcattcccggaagaacctctaccacatccggctttgctgccgttacctgtgttttcacattttcataggccatagaatcaatcaaaaatacgcgcaataccgtgagcattccaagttctttcgctcgatggataatcgtcggttttgtggaaattacaccatccgcttctgtatattttttgataaaatctgcagcaatgttcttcgatgccagcccatggatcaagtctagatgtactaccgccagttttcctgctgcttttactttagaaacaatctccggaattgtacagatgtctccatataaaataaatacaacttggctttcacttttcaggcaggcatctactccttcatcatcttttaccgctgcaatcacaggggatacctccaacgcatccagaaatttataattcatttcaattctcctttgttccgccaagatcaaatgaatgccagacacagaaactgtgaacaacagtacttgtatctggcatctgtttcataaattatactatatctccttcacaatcgtctagtgtactgcatccacatttccggcagctacgatatttacacctgtacctgccacattttccaacacaatatctccaatgtgaaccggagctttgatcgttacgccgcaaagtgctgcgatacagtcaaaaatcttatctttgggaatgtcatgctctgtcttcacattgatcattggtacttttccgtctgcgacacgaactgtagtcgttacaatacgcgttggatcagttacttcctttcttgcatactcctctccacgtggacacgtatttcccgtaaccgatgtaacttttccatcttccatttttacaacgatcggacatcccatcgggcatccgatacagattaattctctctctttcattgcttatgcctcctcgatccgaatcgtaatcttctttgtctccggatattcttccagtttgtttttctttaaaatcacctgctccatctcacccggtgccattacctgacgctttttcttactgatcagctgatcatcaaaataaactgcaatcactttgttcttatatacatctccgacacggaaacgaacggtcaggttttcttccatttctgaaggtcttacaaaggatggcactgtatagcgcactccgccttccggagaaatcggaagcattacagcctgcgcgtctttttctcctgctttaatataagcagctgcattctttccggctgccgttgcctcctgagatacaaagtccaccaaatcgtgtacgtgaagtacatttccacaagcaaagatacctgccacgcttgtctcaaaagagtcattaacgaccggtcctgaagtaacctgtgaaagttctactcctgcgctttttgaaagttcattttccggaagaagtccacaggataagagtaatgtatcacaagtatatctttcctctgttcccggaatcggcttgcggtccggtccgacttctgcgatcgtaactgcttccacacgatgctttccttctatatcaatcacggtatgactcagtttcagcggaatatcaaaatcatccaggcactgtacaatatttctcttcaatccaccggaataaggcatcagctctgcaaccactttaaccttcgccccttcaagtgtcatacgtctcgccatgatcagaccgatatctccggatccaaggatcacaacttcttttcccggcataagcccttccatatttaccagatgctgtgccgttccggcagaataaattccggccggacgatatcctggaatatttaaagctcctctggaacgctctctgcatcccatcgccaggataattgcctttgcctgaagaagcagaattccatcctcgcggtttgtggcggttactaccttttccggagaaatgtccatgaccattgtatttaatttatattcaatatcgcgttcttctacctgctcaataaaacgtgctgcgtactcaggtcccgtcagttcttctttaaatgtatgcagaccgaatccattatgaatacactgctgcaaaatgcctccgagacttttatctctttctaaaatcaatatattatctattccgttatctttcgctgcgactgctgccgcaagtcctgcaggacctccaccaattatgattaaatcatatgttttcattttactcatcctccagttctttattttcacctacgataaattccgatccaacaccatttttgccaatctgatcaaccggcatcggaacttctctttccagaatctccataaccttcggggaacagaatcctgactggcaacgccccatgccggctcttgtccggcgcttcactccatccagagagcgtgcaccaagcggacggtgaattgcatccaggatttctccttctgtgatcatctcacagcggcagataatatttccataagccgggttttctttgatcagctgatttctctcttccagagaaagcgtatccggatctaaaatcccatgtctcaccggattaaaatcagacttttcttctgcattcaaaaggtctcttacaagttctgcaaccgtaacaccgattgccggtgctgaagaaagtcccggagattcaatgcctgctgcattgatcagtccttttacatccgctgattcaccaattacaaagtcatctccatcctcgtgtgcacgaagacctgcaaaagaagtaatcacctgacgaagcggaacattcttaacgctatgagagcaaactcttgcgatctgatccagaccattcattgtcgtgtttacagcacctttatcttctacatttactgctgtaggacctacaagcagattaccgtgaactgtcggtgtgaccagtactccctttcccattttcgacggaagctggaaaattgtactcttcacataatctccaactgtcttatccaaaagcatgtattcccctttacgggctgtgatatgaagctttctgtctgaaagctgattattgatctcatcagcataaactcctgctgcattaataataagttttgtctcaattatctcatcaacaccgttatccgtgtgatgaacctgaactctaaatccttctcctgtcttttccagtttttcaacttttgtattcatgaaaaaccgaacaccgttctcgtatgcattttccgcatatcccattgtcatatggaatggacaaacgattcctccggttggagcccacagtgcacatgtcacatcatctgccaggttcggctctttctcgatcagagcctctttgtctaaaatctgaagtccaggaactccatttttcttacctctctccattaaaacctgaagtccttccggatcctgctctttcgtacatacgaccaaagaaccgtttctcttaaatggaatgtcaagctcttctgcgattctgtccatcatcgcatttcccatcacatttaactttgccttcatcgttcccggaactgcatcaaatcccgcatggatgatcgcactgtttgccttggatgtctcattacagacatcctcttccttttcaatcacacacgtattcaacttatatctggaaatctctctggcaatcgcactgcctgtcactcctgcgccaataataacaacatcaaacatatccattcctctcctttatcacacaaaaaaagcaaggcaaataaaacgactgcctatcgtttcatctaccttgctcaaatctctggtatctaatattcgtcttttctttattctagcacatttttcagaagaatcaatcccaaatatactcagagttacctatgaacatcagtatagttactgttcacacgatggggcgagatgcattcaagccaaaacatgcatcctccgtgtcaatcagcggagtgattgacacgggagtgaacagtaacactggttatgttatttcaggtgaacatataaaaatcataattgacattcaaaaatatgtagtatataatcgttttgttcatcggagggtgatttgttcgatcagaaacaatagctggataagatggcagactgaaatgtccgctttcttattcagcttttttgttatctgcctgattcgactgaattttcaacaaaatcaattatacaaggaggaatttcagtacatggaaaaaaacacatcatttaccgaaggaaaaatcatgcagccgttacttctgtttgcagttcctgtattgctggcactctttctacaggctatgtacggtgcagtagatttgcttattgttggtaagtttgcatcttctgctgatgtatctgcggtatctaccggttcacagatcatccccacaccgtatcataattcaccggcttataaaatgctttttctctgctttcatggtccatcggccgatttcccagcagccacatggtcttcgctgcaaccgcctccggtgtcatatcgtaagactccagtacattgcacagttttttcatttcatgtccaacttcataaaccgtcatatcacttccctcatgggcaacctgcgtgcacaggacgatcattttttccggatatttctgacaaagttcataaaacatatccttgatactggacggaatcccaccgatgccaaaactctccacgataatcgcatcgtaatgttcgaaaattaccggaagaagcaccggctgaataccagggattaattttaataagaaaacactatcacttaacttctcataaaaccgcaccggtttttcatatggcagcatcggcagataccgcagaatccggcgatcctgtatcacagccaaatacggaaaatcaatactggaaaacgcgttatagctcttggtccgcactttttttgctcgtgttcccgcgatcacctttccgtcaaacacgatctgtaccccctgggaagcatcgtcacaggcatagtaaaagctgtccgaaagatttgttttggcatcggtaatatccagattgatcggacgctgtgcaccggtgatgacaatggacttcggcgaattctgaatcatataggaaagtgcagccgccgtataggccatcgtatcggtgccatgcgctatgataaatccatcaaatgcatcataatgttcccgtataacctttaccagcatgctccagttttccggcactacattggagctgtccagattaaagggctgcacggctgtaatctcacaaatcttctccacctccgggatataagatatcaattcttccggcgtgatctgcggagtcagaccattttctgtttttttcgatgcaatcgtaccaccggttgcaacaaataagattttcttcattgttttccactccttatttctgtataatcatcactataaacaattcccctgattaactgttatactctttatttttcttgctttatttgcacataattcttataataaccataggttacacttatactttacaatatcataaccaatggttatgatcaagaggtgatcacagtgaaatttcgtcctgaccgtttaattcaattaagaacatctatgaatatcagcaaagccgaggccgcccgccaacttaatatttccgccatgacctacggccgctatgaaaaaggagaacgcgaaccctcttatccgtcagtatcttatattgctcagatttttcattgcaatattgactttttatatggaacttcagatgtcatgaattgtgattatatcgttatttcacgttccgaatctccggagttatattctctggtagaaactcttcagcaaaatcacgacataaaagacaggatcctggcttatgcacgagaactgaaccgcaaagaaaaaaggggataaaaaaacagtttgttttttatataaaatatttccattaaaacaaactgttctttaatttccactaattttaatatgattttcctatcatttatcatttcttctcgcttaattttacccatctgttttaaaatagctccacttacttttttcttccacagcatttcttatatttttttccactgccacatggacagggatcatttggatacactttcttctcttttacaatcggctgctgaatccccattcgtcccattctgtcagaatttcatatgtatcttcatagtctatacactgctgtaccatgttccgtaacgcctgcgtatatcttttttcatcatagggctgattttctttcattacatcataaatttcttctattacaatcgcacctattttttctttcgcctctctcgcagaatatcctgcatcgatcagtttgtcataagattcctttgttacaggcggattattttctcttaactgattatctacaacttcaaatatcagtttctttaatcttaagtttgccatttaatctccctctccaaaatacttcatcttttactgttatttatactcgcaattttcttcacaaaaaggcagttactttggtatgctctctgaaaggcataatacccccgaggatgtcaagtcattgctacaaactttttgaccttttttccttcgattttcccataaaatcgttgttttggaacagaggacgttatattgttgtcacaaaatcagtggggaggatgtaacgtcattgtcatattatcgccactttcattgccgttatcatcgccattggcaatggtaatggcaatgacaattcaacctttataaaataagctacataagcaaaacattttacaaaatactcacccggtggttcatacctctgacagtgctccatcactctctatcattttgatctcttcagctgcattcaagacattcagctgatattcagcaatctcttgtaatattttgaatctttctcctttttcttttccttcacgcagcatctgtgcattatgtgattccagattggatagaactgttaattcattaattgttgcaaaatctctgacattgtttttctttgcaagttcaggatttgcctctctccatgctttcgccgtaaatccaaataatgctacatttaatatgtctgcttcttccgcatatgccagccattgaaggttttctctgtaattcatttgaggaagcaagtatctttttacagcatccgtctggatcagataattatttttacttaaaaaacgttttgcatcccattccttttgttcagaattgttttcttcttccttcaaccgctggaattctttaattaaatacaatttaaaaaccggactgatcgcagatgcaaattcaaaggcaatgtctttgtgtgcatatgtgccaccatattttccacgtttcacatataatccaatggcatttgtttcatttacccattccgaaacactaggtgtaaaagtcaataaccctgcttgctttttaaagtgttcggattcgaacactttaaaattgggattatatatctgttcccatacagacaaatattccaaagtaccacgatttctcaaccaatttcttaccacatctgctgccctgacagaatctgatttagccttagcaatatctgtaatgcaaatgtaatcatctaacttctgtttcgaaattgaaatatgcacattttgtacttcaattactttattcttcattcacatcttcctttacaataagatcatccatctttactttatacgccagcaaacgtaatacataatccggcatctttctggttcctcgttcccactctgttactgttctgtatgggatttcaaaatatttacaaaattcctttctgttcattccggtactttctcgtaattcttttattttatcttttatttccattttctctccccttttcatttacacattgtgtatgtatcgtaacatattttttcatttattacaacatctatcatcttcattttggtatgctctctgaaaggcataatctccccgaggatgtcaagtcattgctacaaaaaatatgcggcttttttaccacgaaaatggcttaaaaccgcatatttctgtatagaggacgttatataattgtcacaaagtaagtggggaggatgttacgtcattgctataattttatccttccattttcttcttattatcttctgatctcaacaaatcatatattgttttttcactttttcgcactttagataatctcttatattcatgaagacttttttccagcactgatatatcagaaaaatactccttgacaaacgaaacacttttgacgtttttcatttttaaaatagatttacaatattcacttggcgacataccctttttcttctcaaaatcctgatattttccttcattacaaattatcaacatttcaatttctggtgctgtaattacattcacaacctctactttatgctgatatgctttacttattttgaaattttctcttcttgaatcaagtattctatatactgttatcttacctgaaaaatcctttttcaaatatcgcgtttcaaaatcctttccttttcttgtcttaaggatttcgccctcaagtaaatcatttcttgaaaaaatcagtttattttgatccaataataaatccaatattgcagtttcagctcctccttcacaaatacaggcagtatacttagtcattctcttcttcatcctcctctatttttacactagaaaggactttcttcaatgccatatatgcctcatatactggtacagtaccttctaaatatccgctttcatatgcttcgctcttcttaatatcgttgcgtttcaaaataagtgaaagattttcagcataaattcctcctcggtttctgacaatgtaaatacaatcatttctttcatactcatccaatagctctgaataatgagtagaataaattagagtagcaccatttttatttacatttggattcataaaaaatcgaactaatgtagttacaatttcttcattaaaatgattttcaagttcatcaacaattaagtatccaccttccacaaaacaaagaagtgcattcataaaaacatttattcccttaatagtacctgatgaaagatatttttctatctcactcggtctattgagtatgatttcttctgacccataaaatttcaaacgaatatcagcagattttttttctacattacatttaaaatactcaatactaggatctaaaaaagttaacaattctttcggaaatcttccaagaatatttaacatattatgatttgtccacattaacatgtctcttaccggaaaattggattgtttttctttatttatcgcaatcatcacacttacatcatttaacaaaaattgttctttttcatttctttcaattcttatattcgagtcattaaaatcaaatatatttttttttgtttttactttattagcatctttttcccaaagtctttcttccgtaataattaatttttcttcattgtcaacctggtttattttttttgctataattgtttcaagcttatagatactattatcattataaaaaaagctaatgattttaaccttttcgccttctgataaatcatttaaaatctctttagatttaatattattcaaagcttcattattaagcaaatttataacaaaggaaattgctttcaatatcgttgtttttccagaagcattcaaacctataaatgaaattgcctgatttgtataaatgctagttttactgttagaaaagacatggaacagtttttctttatcatcctctgccactctctgtttagtaataaaatcaatatctatatctcctttaaaacgtggcatattctgtataaatatttttaacagtctcattttttcaccctcttattctcggtatatttgttattacatttaatattatgccataacgctcaaaaatattcaatattaaaaacgtaatgttcgtttttatttccattccacctccactctcccatcatcatacacatatatcccctgcacatattcttccagcatctctcgtgtcagcttttcatagcctaaatacatcaacatctgctccaccggaacattctttttcatcaggatttctttctcaccgtttatcagttcttccaactcctgtatacgtttctgcaatcgttctctttcttcttccaactgcttcttggcttccatgaactgtttctggttcatctgtccctcgtgatacttctcatagttctgacggttctgaagctttatctgctcctgacgtttttcacagtccgtactttccagctcataggcttctatgctgtccgtatgctgttttctcatagattgctgcatctgttcctggctgatattctgacgtaaatatgccttaatttctgccagcacgatatgctctagcattttgttatcagcttttccggcaaagcatcctgtatcttcttttcctttactgtaagcacagctataaaggatatgaccatgaaccggactgcttgaagtcaggcttctgcgacaatttccgcatttcacatagccacctaacaatgttgtttccctgtcgaatttgcttttcttggtgtatctgatctgcaaggactgtgctttttcaaaaatttcttttgatacgatcggctcgtgatgattttccatcactttccactgatttctcggtaccggtacttctttccctgttccgggatctgaaatttttgtctttccatagaccatacagcctatataagttttatcatccacaatcttccgtatcatatcactcgtccactgcagtcctcttgatgcagctttcttgctgtctgatttctgtcgtctgctcatggactgcaagggagtcagtaccccctcttcattaaataaccgacaaatctccatcttggaataccgctgatttgtcagttcaaatactctgcgaatcacttctgcttcgtcctctacaatcaccagttctttcttattttcaggattgattcgatacccataaggtgcagatccacagcaatactcaccttttcctcgtctggtactgactgccgattttacctttacagactggtctttcacataaaaatctgcgatcagtcctttaaactgtacttcgatgtcggaactctttcctatataatctttagaatcatatcggtctgagatagaaataaatcgtactcccaggaatggaaaaatctgttccagataagttcccatctcaatatagtttctggcaaaacgtgaaaaatcttttaccacaatacactgcactttattctccctagcaagttccagaacctgcttaattgccggacgctccatactggaaccagaatatccatcgtcgtagaactcctgaaatggcatagaagccagttccgggatattggaaatataatcttttaccagttttctctgattgataatgctgttactttctccctctgaatcatcttccatggaaagacggtaatatccaataatcagtttctgatcactcatgttctaccgcccccttaaacccgaagttgatttccagtctgccatcaccatacagatacatactttcaatcaagccctccgcaagttccgcattgattctggttgtcccatccagttccaacagacttcgtaaaaatctggcttcttttttctgttgtttttccagctttcgtatggtctgctccagagacttctttctctcttcacaaaactctttccagttattacggtcatctttcatttctatataggcttctttggaaaattcaccctctttatatttcataaacgcctgtgccagtttttctgaacgtctttccatatctgcatccaattttctgatctcagtttgaatctcattgattttggaaagaaataccgcactgcttatagcagacatatcctttttccgcaatccagataactgaaactgtctggttagctccgaacggacaattttctgcagcttctcttcggaaatagatttgtgactacattttctttcatcccgataccaggcagcattgcaaaagtaatacacattgcctctgtatctacgtgtacacattttccgcttacaatcaccacaatagaatacattgtaaaatgctctttcatcatcttcccaccctgcagtagtttttgttgctttctgttgtgctgcttttagcctgacctgtgctttttcaaacaattctctgctaataattggctcatgggcatttggcgtaataatccactggctctcgtccaatatgtcacaccatttttcacctctttgaaatctggattcatattttctctgaaccagatcgccataataattattccggttcagcactgcacgtatcgaagaatttccccactgatgaaggttctctccgtcctgacagtacacatgatgatattggttataatctgaaatccgatgtaccctatcctcaaacagcctgtcaataatgctctgtacgccatctcccgaagcatattcttcaaaaatcctgcggacaatctttgcagcttccggttccaccatcaacttataaattccatttatcttttccacacaatatccatatggagctgtagatcccacatactcaccatttttctgtgcaatacgtttcgctgcccgttcttttgcggaaatgtctttcgcataagcatcattcaccagattcttgatattcatggataattcctgattcttggcatccggtgcaaatgaatcatagttgtcacatacagaaataaaccgcactttcataaaaggaagaatcttttccagatagttgccagtttcgatataatttcttccaaatcgtgagaaatcctttaccagaatacagtttattttaccttccctgacatcattcatcatccgttcaaatcccggtctgtcaaaatttgttccggtttttcccagatcagaataaatgttatatacagcaatttcatactctctgttcggattttcattgtgcttctgaatgaactcttttatcagcgtaacctgtgtttcaataggttctgactttttttcatcactgtctacggataatctgacataaattgcagccatacataccggaatcccaagaactttcttctctgtgtttttcttatatctttttgctgtccttgccatttatcccacctctttcctgcactctgtccggtgttccgcataaaaccgtcttatgactttcattttctcaatcatatcctgataacggatatgaattttgatctgtttgttttcataaatatagattttatctacagtcagtgccagcaatgtgcgatccagttctttgatttccagtgatttcttccagtcctccaactgaacagttgcagacactccaccctcaaacatttgctttaccagttttttctggttttcaatcatctgctccagttcttcacattttcttccgtaactttcccgaaaatcatcgaactcctctttgctgatcaatccctctttcaagtcatcacccaaagatgctttcaggctgtaataacggttatattcttcctgcaacttactaatctgcgtatcataaccgattacctgatcgtaactgactttcatttcacaaagttcttccataatcatctgatagtctacgaaaagtgccgtatatgcctgaatctctttcaatacaatccttttcagcacctcttccggaatactgtgtctggtgcaatctccacctttattttttgtctggcaaatataaaaggcttttttctttcccttatactgatttaccctgcgtatcatcggtgtatggcaatctccgcaaaatacaaaacccgaaaaaaagtttgcactgtccgatgttttcgatgccctgccatcatactgaagtagcttctgcaccacatcaaaatcattctgcctgattattgccggatgcgtattttctactttcacccactctgattctggcttatccagacgttgctttaccttatagctgattcgttcctgcttgccttgcaccatgtttccaatgtaaacctcgttggtcagaatccttttaatctgcactgccgaccatttcggtgtgtctgagctgtgaaatccagaattgtaattctcgccatttgcctttttatattcttttggcgactgcacatgacgtacattcagtttttctgcgattgctccaagactgaatccatcaattttccacgaaaatatttttcttacaatatctgatgcataagaatcaatcaccagacaattcttattctctggatctttgcagtaaccatacggggcaaacgctccaataaattcacctttttcacgtttgattttctggtggcttcgcactttaccggaaatgtcccgacaatagctttcatttacgaaatttttgattggaactacaaatgacttctctgaaaaatctgctgttttactgtcaaactggtctgtaactgaaataaaacgcacatttaaagccgggtaggtcttttcgatccatcgcccggcttctatatattctcttccgaatctggataagtcttttacaatcacgcaatttacttttccagcttctatatcagttgtcattcgtttaaactcaggtcgatcaaaatttcctcctgagtatccgtcatccacatatatatcaaagatctgaatatccggctggctttttacaaagctccgaagtaactctctctgatttgcaatgctgttgctctctgacttcgcaccgccctcttccatatcatctttcgataatcgaagatacaatgcagcatcgtatatatctggcatattcatttgcatctgttccattttacatcgctcccaacttacttattccattgaatttgaagtcagaaaccatgtatcacgttcattttccctgacctcacattaacataacatctgtacctttgcaagacattttaatacatcaactccgtcctttttctcagataatcactaatggcatctgtggcatccatttctcctgtcatctccacaaccactacatatccttcattcatgtgagcatacggctgatcgccggatttatccagaaaagtttccactttctcagaaatagctttatccatatcaggaattaaatcttcaatgtcctttaactgctccagatcaacactagaatctattaccgactgattcaccatgatgctcacctcttttccaacatattctttgtatcagttgtcctatacctacaattttctcaatcacatcaccttacctttcacattttgttctcaaattttatctattactatggcattgcatattctgttcggcgtgttggcttccatttgtataacccgttgtcaacgtcacagtcaacctctatcagagtatttctgaatactgccagcttcttcgcaagcctaccagtcgtttccggagtatcttcgacgctcgcccataaaatcatttacagggttatggcatctgtgagatcagattatacagctcatgtaattttcaaggtacaaaagagtttttttgaatatcctttcacttattacagcctggaaacaccaaaatgttgttcacttcaaaaaaatcctctcactaataaagcctgacagaaggattttaccaacctcattttgcaataatttgcaaaaagtatttatcctcatctgtacattcgctttcatgcgaacctttatcgtactgttattttaattcgcattcatgcgaatgtcaagtgttttgttcgcttcaatgcgaatctttctgtttacattcactgtttttggtagtaaaatggatttatcaaaaagaaagtgggaaatctgatatgacaatcggtgataaaataaaaaaaatccggacattccggaatatgacacaggcagaacttggtgctgccctcggttggggcgataaaggtgcaaatcgtcttgcccaatatgaaacgaattaccgggttccccgcaaagatctggtaactgaaatggctaagattctggacgtaaacccactgacactacatgagccaaccacgatggacgcctctgaactgatggaaattctgttctggattgatgaatttaacccagcagctattaatctctttcagttagaaacctatccgggtaaaaaatgcaattccagtgagggtaccgctgtccgttatcatgattctgataactggccggctcatccacctgttggtatgtggttcaattatggagttctcaatgattttatgaaagaatggcttctcagaaaagaagaattgaaatccggtaaaattaccagagatgagtattttgagtggaaaattaactggccacagacctgtgatgggtgtgggaaatatgagccgaaaaggcaatggcgatctgcaaatgcagaacttagtgaaacttagcaaaacttaaatttattatgttttttctctttaaccaaagaaaaaagcactgaaaaccatcagtccaacggttttcagtgcttttttcatattgctctattgaattttcctcattccacctatacaagtgaaacttagagaaacttaaattaaatctctttcagacaattcaatttggatattcaccaactgtggattatttctcagtgggccagtttccagcttactgcctgctgccttgcatccacaaatctcttataaatgccttcctgcttcattagttgctcatgtgttccctgctgtacaattcttcctttgtcaacaaccacaatctggtctgcatgtctgaccgtttttaatctgtgggcaatcataataatcgttttttcctttgtaagtgcatctactgcatccatcagctccttttcattctctggatcaacatttgccgttgcttcatccaatatgacgattggcgcatccttcataatcgctctggctatcgaaatacgctgtttctcaccgccggaaagtgtggctccaccttctccaatcactgtgtcgtacccatccggaagtttgctgataaaatcatgacagcacgctttcttcgccgcttccaccacttcctcatgacttgcatcctgacgtccgaatttaatattattctcaatggtgtctgcgaacaaatacaccgactgaaatacaaatgaaaaattacgcatcagactgttcatgctgtagtcttttacattcacacctccaagtgtcacttccccggaatccacatcccagaacctggcaatcagattgcaaagtgttgattttcctccaccagatggtccaacgattgctgtcgtcgttttctgcggaatagagagcgatatatcatcaatgatcttccgtttgtcataagaaaacgaaacattagaaagtctaatatcgtaattttccggctgtatttctttaccgtcgatatccatggtatccagctccaatattgcatttgctttatctacacatacgcttaccacatgtaaaagagatgaataatttcctgcacattccagactggcataaagcataaatgctgagattgtcataccaattgcatagaccgcactcatagttccattaatataaaaatatgcactgcatgctacgattactgcacctgtggtttttgttatgacgctttgcagaaaatgataagggacaaacaacatctccatctttgtattaatcttttcgcatgcttcatttgcatcatttaatctttttgcctgttttccaagcaggttgtatgattttacttctgatattccctgcagatactccatgatctgatttacaagctctgtatcgcataccactttttgctctgaatcgtttttccctgcattctgcatcacagcatttacaccaaagaaaataagcactcctgctgcagctgtcagtccaattctccagtcaaaaagaaacagcataagaatgatcatggatgtttccagaattccctgcatggtcagcataaccactctcgcagctacatcgccaagtgtttccattgtattcgtcgtaatagaagaaatttccccgatgctgttggcattaaaatatcccatcggcagatagcgcagatgctctgcaatcttgattctcataaaagcactcgcattatatcctccttctgtctgaagcactgtagagtatctcttacagatgacatcaactacaattgcaatcaccatgatcgcaattgaaccaccaatatattttcctattggttttccactcatcaaaccaatcaatatgtacataatagccggtatcttcattgctgaagcgagagcctctataagtccgatcactatcgacagtttaaatttattaccattttccctacctgaaaaacgaaagaattttgccagaattccaaacatatcattctccctccttcaccgtatcttttacagaaatatgggcatcccacatttccttataaagcgggcataacatcagtagttcctcatgtgtaccatgtgctgttacatttccatcatttacgacaaagatctgatcactgtccttaacggtagaaagcctgtgtgcgattacgatcagtgtcttccctgctaccagttttgcaatagaattctgcagaatcgcctcattttccggatccgtataagcagttgcctcatcaagaattacaatcggagcatccttcagcattgcccttgcaatggagatacgctgcctctctcctcctgacagatgtcctcctgcacctcctacaaccgtatcaaatccgttctcaagctgcatgataaattcatagcatccgcttttctttgtcacctcgatgatctgttcatctgtagcctccggatttccctgtctaatattttcacgtaccgtttcattgaacagataattatcctgtgcaacatatgcaattttccgattaaaatctgcaagcgacatttctttgacatcaactccaccgattttaatacttccggaatccacatcccacaaggacgcaatcagctttgcgatggttgactttccgcttccggaaggtcctacgattgcatttaccgttcctgcttttagctccatagttactccatgcagaatctctttgtcgtgataaccaaacctgacattttcaagtgtaacggagttatcttttggaacacttttacttttctctggacgttcaagctccggctgttccagaattcctgccacttcaccaacaatcactccgatcttgccaagatcatctgtataggaacccactgtgatcaacggtccaacgattccaagtgataaaataatgcagatgacaaaatctgaaatcgcaagtgttccattggctacataatgtgccccaaacggcaataccgtaagaagcgtataaggtgtgaccaccatcatcagtccatgaaagatcgagcaccgtttcatccaggaaataaaggaatctgcatattcaaaagccgcctttgtaaatttggcataagaactttctgtctttccaaatgccttgatcacttcgattccgtcaatatattccactgccgcatcattcagatcttttgttgtctgaaccgttctctcgaagcttggtttataatccagcatcattccaaaataggaaagaaatcccactataaccggcaccaatgaccagagtgccagtctccagtctgtcaggaagaaataaatcaaaatcacaatcggtgccagcagattggacgtgaattccgggacaatatgcgccagtgttgtctcgatactgtcgattctttccaccataatatttttaaatgtaccggaaggtgtgtctttcacatagccaagaggtacccgcgccagcttgtcacagcaggattttcttatatttgcaagtactgcaaacgttgctttatgtgacaatgctgtcgaaagtgaatgaagcagttctgcaatgataaacgataatgcaatcagaaccgcttttgcaagatatatttcaaactccttttcaccatttaaaaacagctttactatatctgcaataataaaatacggcaaaatcttaaaaatcacatttccgattgcaagtaacacactccatacataggcaattcttttttgtccggcccatgtcaggatccagctgattgccgacttctttttttctttcacattcgttcactccttactttggttttattgttgtttctttcattagtttattctaactcatatataataaaataggtggcttactggcattagccacctgacttacattagttataccgggaattcaatattccacaatcgttcccagccacctgtattgaattctttcagctgatgcacatttttctttgcagtctccctgtctatatcatgctcaatgatctgaaatactgatgaaaaaaatcccgtatagatcatatgcataaggctttcctctacaatcggtattttcacaccgttctctttcatcttttccatatatttcaggctggacttcatttcccgttctaccatattgtgtatgaatagttcaaattttccactgtctccacatttcaacaataatctgaaattatcataatgatcataaatataatcaaccatctgctccattccatcactggatgtatacgacatattccttgtctgatcactggccgaaagcttttcaaactcctcaacgatctgatcataaatctgataaatgtgttccatatagggatctgtcagtgcatcaaaaagtgcctctttcgtcggataatatttgtaaaatgcaccagtagtaagtccggcatcttttacaatgtttcttaaagatgctccggtcagaccatctttcaggaaatgttttctggctgtatttaatatatttttttgtgtatcttctgcttttgtcgacattcttttcgtatcctctaaagttctttccaaaatataacagtgctatatagcactgttatattttaactcattacaggaatttgtcaagtctgctgtttcgattttttattttcccgtgtattcaattttcacttagcagatgcatctgtagtttgattttgccgtcgtcacaccacatgattctcttcagcatctttccttttgaccaatataaacttttcattgctatatataagaacggaaccatgattctgcgtgttgcctttccaatttgtacaaactgtccaccatcaaaaaatacatgctttaacggtatttttgcctatgtcagaaatgccatggcaagatctgcaccaatcgaagatgcaactacaagttctatttctttgattccatgtttaagcctcctcttcgactttttcaaaatctactgtcagttccttcatagaaatttttaccacattaaaaccatactgcaaaagttcctttttgaatgtaaggaacgaatgatctataggcactccggcaatgttttcaatttcagcaaaagtcaacttgaaatcgtctgttttatttttattgattcacttccataaaggattatatttgctcataattatcattcatctactttccaaaactatttacaatatcctttgccatcagtcagatttactccacttgccacaacacttttcctggataaaatattttcttatcttctccattccttctgcatccatctgatactgatctgcaatagttccattttcaaaatgaatgacatcagtgcaacactctataatcagttccaaatcatgtgtgatcacataaaccgaaattccggtatcccacacttctcttagaacctctgcaacctccagcatatgcttatgatcaagaccactggttggttcatccaaaaacagcacagagcgcccggaggcaattgcagatgcgatagccgcccgctgcttctgacctccggaaagtgacattggatgacggtctttgacttttatcagatccagcatatcaagaaatttgtctgcttctttctcattttcttctttcatgctaatcataacttcatcctgtattgtctctgtaaaaagctgatgattcacttcctgcataaccatataacaggctttcagcctttcttttggtctgtaagtttttccattccagatgattgtgccacattgtttttccaaaccacagaaacaacgggaaaaagtagattttccagctccattattgcccgtaattgcgacaatccgatttgccggaatctcacattctctgatatataaaatctgtggaccattcttatatgcaaaattaaaatcatgaagttccattgtggttctttctgatatcaacatctctggcataaggagattttccagaacataagcccgcagtcccatctcttctcgcttttcttctgtcagattttcaaactctgtggctgaataatcctgaataatctgtccctctttcatataaataaaccgatccgccagcccacgcagataatacaggcgatgctccgatataataatcgtttttccctgttccttccagtgggcgattattcttcgcagatccatgattgaagctgcatccagattagaagagggttcgtccaggacaaaaatatccggtttcataatagaaacccctgcacaggcaatcttctgcttctctccacctgaaagctgaaaaatattgcgtccaatcaattttttcagatgcagctcctgaattgtagcctgcaatcgatctttgatttcttcctttggcattccaagattttcacatccaaaagtaatctcgcttgttgtatctacattaaaaaactgtgaccgtggattttgaaaaacacttccaacaatttttgctgtatcatacagtggctgctgcgaaacatttatcccatttatccatatctcaccagttaattttccttcataataatgtggaatcaacccattgatcattcgagtgagtgttgtttttccacaaccgctctccccacatagcacaataacctgaccatcttctatctccagatcaatatcccggattcccacagaatattcattattttctccatatgtaaatgttgcatgatctatttttatcataatgtactacctcaaaaaacaatatactgatgcaaaaagaacaatataaagcatgcaaagcaaacaacaatggcactaaaatcctgtacatgaaagccaatctcgcagacattggttcttctgaccggtgcaccaagtccccttgttagagctgctgcagacagctcatcaccaatttttattacggataccatcaatggtatcagccggtattcaatcataaggaatggatttttaccaccaaaacggatatttctcattttcattgcatcccggattgcctgatattcttccttgattgtaggaaagaaacggaaaataactgacaacggtattatgattttttctgtgacatgcatccgctccattgcactgataaactcacttacagatgtagaagaaatcagatatgcgcctgtcataattcccggtgcaaaacgcgtcataattgatgttgctgccaatatcagaaaagaaatcataccactccaaacattcaatgccagccgctccagtacaaagcataccgcatagagaactgcatatttaccggctgttttgaatttgtgctctgacaaaatcaatgcaaatggtataaggcttagtattggtttcactatattcatgattccatcattgctggtactgaacatcaatgttgtaatcgttataagcataaacaattttgttctaggatctaaaacaattccatttctgctgtcaacagtagcagataatatctcatccattacacgattcctgcttttacaaagtgttttttgagcaacgcttttccaatcattcctccaatgattgcgcagataaagatacctgcaatcacaagaacaatgctccacataggcatgacagccattactttatctgcatactctttaccaaaactggctgcgaagctggctcttgaatcttctaccatgaagtacattggaatatatgtaccaaccatccagagactgaatactgcatatccaatcaggctccttttagcacttttataattgccaaatttcagaatcaaatctcccagcagcccaaagataagccccaaaggtacaccccaatatcccattccggtaagtcccatcaaaaggccactcagaattgccatcagcgttaccataccaaacttctttacccttgtcaggaataacataaatggaattcctgtgatcagtgtccacaatgcaccaagaatcggaagaaatatcggaacaaagccaatcggaattgccacacaacatccgagtacaaaataaaggactgtgaaaagtcccagattaatcaggtccttcgcctgtaatttgttattcatacagaatacctcccttgtataattagctctatctaactactccataaaataccatatgttttgttatatctctacaaccaaatatcattttagctccaaacagcattgggttttattgttgactctgctctcttcaaatcctataatattatctgttacagggcaaaagtacttatatcagggagatcttctatgaaaattaacgacgtgatcaaaaaatgtatcaaaataccaggtatatccataaaacaggctgaatatagtatggagcttatattaaatacgaaggatggtaaaggttcgatgacctttttttcactttttcccggtctgtctctggcatatatttttataaattctccaacctggacggctcccgaccttcgatcagacagctccattacaaaaggtccattgcttcttaactattgtgtgacaggtcgttgtgaaatgatcctgaacaacaaaaattttgtctacatcaaagacagagaactttctctcacagaatgcttcgcccaaaaagaatatgtttatccaaagcgcatctatgaggggcttgaattctttattgatatagatacatttactttagaaaatacatgggtacaaaatgaatttagcattgatttcagaaaaatctcaaagatgttttgtcctcatggaagcacttatatatcgacagcgacccacgaaactgaggaaattctcaaaaaactatgggaattatatgattttccggcctcttttgcagtcattcaaatgaaaatatatacgctcgctttattctcagtactacaaaatttggaggctatccctaagtctcaggcctgcactttctttactgaatctcaggttaatattgctaaaaaggtcgaaaatatcatcacctcagacctaaggctgcatcatcctgcgtgggaattggctgaatatttttctatcagcgaaaccagtctaaaaaattattttcgcggtgtttacggacagaatatttctgtctatctgcgtgaaatgcgtatgaataaagcaggcgaactgcttgcctcaacacgactgtctgtagctgagattgcagcacaggtcggatatctgaatcagagcaaattcgcctctgtgtttaaaaagcattttggtgtatcacctttggaatatcgccgcaccagacatttagactcctaaactctccattttgttgcctctcttctttcaacaataaaatgacgataaatcccatcctgtctcacaagttcttcatgtattccctgctgtgcggttttccattctccagagcgaaaatccgttcagctttctgtactgtttttaggcggtgtgcaatcataataacagctttatcatttgtcaggtaccacccactggtcattaaaataacaaattacatataatcaaacttcttccgaagatatattctgagtagcatgatacccatattaatgagtataaatagcaaaatcaaattcaccggcagatattttctagttacatccccaagcactgctatccctgaaaggcttccaatcaaaaacatttgtgaaatttcgttccacatttttttgtattgttttattgtttccataattatcaccattatgattcccattatgaaaagcacagctacgattgccagaatcctgataacccatacttccccacctgtatatgctattttctggttaaatccattatcataagttggatataccagccatttacaaaatcgaacataccacatgaatggagccataaaaaaatctatgaaatcatgttgaaaagcaccattctgtagaattgcaaacaggactaccgtaatgtatcccattccccagaaatattctatagacttcatgctttccgttctgtcctttacttcttttttcgctttacgaatttccagctcagcacgtttcttttcgttacgggctttggattctgcctgctctatctttttctctgcttctttttgtttcttctgtgcttcatctactgcttcaacagatgatttattaacctgtatctgcaatttagagttctggtcccgaacgtcttttatttcttcttcgagctgctcttgctcgctcctgctcttcaagccgtttctgttcctcaaatcgtcgttgttcttctgaagcgattgattcagcttctgcgtttcggacagttcggttgtcaaacgatgaatttcgtcgtttaatttccgaatttcgtcttgcatttcgtgattctcgaagaatagcttctgtttttccattttcagcttgtgtgtcctttcctgaaatttctggataaactcgttcatcttctgatttctcacctgtaactcgtctctctcttccgtcactagctccagtgacgccgcctgctccttcgcaagctgcttccacttgtcggtagtatccggcaagttcttcatctgatctgctgtctctgttggctgaatctctggcttttttcctatttccattaaattcattctctagtccctccttgctgatatccaaatgaaatgttttgaacagattactgtcacgtactttctttccctcttggttctgaaaagtaatgtgcttccgtttctctgtccagtttacgttccatccgaactgcttcattttttctataaacttttctttgctgatacaattttccagtgcttttaacactgccattgcacagtccgctacaaagctatcctttacctgctgacggaacagattatatttgtctttgctccatgcaatgacttcccctttttcaatctgacttccatcaaaatgctttcctttttcggcaacggtcagtcctcgttcccggcacatctgattggtaagctgtttcatacgttccagatcttttctggtgttatgcagctttctcccatcttcataactcactgaattagtaaccaaatggcagtggatatggtctttatccttatgcacagccactaaggtctggaatccactgaaccaattttctgcaaactcttttccaaattcaaatgcctgctccggggtgatctgctcatccttatgccaggaaataatgttgtgggcatacattctccctgtatctttattccacatcttcttttcttccaaaaaggttctgtacaccagatcataattaatttcattgtgacagtacgggcctgttatataagtaagcagctcacttgtcttgtcctgtcgtaaaacatattcaatacaatttctcattgctccatgtgtatttgtccgcttattaatcgtcttattaactgccatatcctttcactctccttccgatacttgagaatatttttattgaggaaatacaacatactgtcgtttgggatttctccatctgtatgcagttttcttgcaatctggttgatatttgtcgtagctccccggagctgacaaaggatatccgcaaacatctggttcagtcttttcagttcttctatttcctctgccgttgctatcttcaagtctgcgattgcttttatcacaacttcctgctgtgttcttccggattctttaaccttgctctgaaacaaatcgtattcctctttattcatccgtatggttactgtatgatttcgttttctcataggcttttgtctcctttcattgcttgattttcattctttgttaacagccacagcgttctggcggcatattggtaggagatttataagagagtgcaacgctctcttatacaggtgcaggacagcgtcctagtcaatcagtaagtgttccgtaggaatgtccggtggacatttcgcaggaatacttacgccattgacgtgccggggttccaaggggcggagccctctggcaagtttaggaacagcccaaaagctggctccggtgcatagtggcttgccactttgcgaaacttgcctgtcatctccccaccactgaatcgacacccgccaggcaatattttccaccctacattatcaaatccaaatggagatgacggtgggtttgtggtgcaggagccgactgcggaagaaaaagaaaagctccacctttcatagattttccctttctgaaacaggctggtcatgcaccactccgatgcgaagtatcggacaatcatgtgccgtatccggcaccctatatcttttctttgcctgtttgtacacccctctcatctgcaaacacctttctgccatatttccctgttatttctgtctttctttttctgaactgctttctatttctgctgaaaggcataaaaatagcagtcatgaacatttctccaactcataatgtctgaaatgctatcactgctattgtctttttctgctattctgttttcgtaaaactattctttactgtcagtcctttttcctgttactgctattttattttgtcgcaaatttcaagcaggtcatgtaataaattctccagtttcataagtctgcgatgctgataccagatcaatcctggcaatcccgctgcaagaaagaacgaagcacacaaaatctttattgcctgtcctctgctgcttatccctccatatccaaatccacataccagattcacgaataaaacatagaaatatccacaaaataagacaaactcaaaaatccacaccagcacctttttcactttctctttcactctgtacttctccctcctacatttttaaattcagtgtagcgaatttcccgctatatttcaatagtgaatatctcgctaagttattattatgctagaggtgaaacacatgtatcagagaatacgggatctgcgtgaagatcgtgaccttacgcagaagaatatgggtgaaatcctaaattgcagtcagcgtatttacagtaattatgaatgtggtgatgtcgatatccctactcacattctgattaaactggctgaatttcataataccagcgttgattatctgctaaacctgacagatgataaacgtccttacccaagaaaaaagaatagctccacttaaagcagtctgatttattttatgtaagccagactgcttttcttttataatcagctaaaaactgtctgcaaaatccagtgctgcatccatatcagcttctttctcccagtccagattatcttctgcgatctcttcatccgttttctccattgttagtgttctgtctggcagattaatttctcctaccgattcttttacaaacggtacaagcatttccatcagattcttcgctatagccatcggggcagattctttcactccatcccggacagctgtttccactctttccagaaaagcatcttccttttctctggtttccagatacggatctgcttcattcctgtactctctggaaaaataatcgtttaaagcaactacaactgctctggtgtacgatttatatttttccctgtccatcgtctgcaaatattcccatgcctgcctgtcctgttcatcacaaagattcaaacggatatttgtgttgatgattttccgttcttttctcatacaagcatccctccgtttctctggattttccttacgctcattgcttcatagcctttcgctgtggcacagatgtcccgtacaattgtcacccggctcttgtcatattctccaaaattctggatcatacaaccgccaccgccgaccacatacagacgcatcagttctggattatattcccgttctctcagcttatgaaagatttctttcgtataatctccggcagctttacgaatgactgtcagatatttctcaccaatatctgctgtcccggtacggatcacctgctcaatcaccagatcatccaccactgttcccagttctttcaacaaagattccctgactgcaagcacacactggtgcgttccatatttctctgtaaagcatttcttctctaatggacgggaattattgatatacatgatgttcatagtcccgtttccaatatccacaagcatgttgattcctttgaaatcctgtaaacggtaaaaagctgctgcaaatccctgtgggtaaatatcagctcctgcaaactccacacgatattctttattgcggaatgtaaaatccacacattcattctggagaagatatttctggaaatcttctttctgtatagctacccaggtaagtggaagtccggctgcaatgtgtacctttgcccggttcatacctttcccatccagttcccttgcgatagccgccagtgtcagcacataatagtcctcgtcctgcgttttctctgcatagaactccttgtgttcctctccgatctggtaatacatgtcattgtaaacaagaagattattctggaagattggctccttgtcatatctggctacaccggatggaaagcatctggtggctgttttcatgtttccatacccatgatcaatcccgatcaccataactgtctcattattgttgtttttcatcattctcataatcatacctcatactttcttaatatttatttttgactttctcccaaatttgggaaaaacctatatttgtatcagctaaaacgttgatacatgaaaaagggcagtcagtgtaaaaaaagcaaaattttatgtactctggcagctatctttgttatttctcctgctccggtaacatttctttttgcttattttgccctaaatgcccttaatttcctgattcatatttaattgtaactgtttataatctatatctgtttcttcaaaaggtattctttcttctggatctacagggcaaaaatcttcttccttaactgcaatatcctgataataaaactcaccattgtactgcttcagaaggaaacctttatctgtcatatttctgaaaaagttggatttaccatgcccctgtctgccattctctttacagtattcctcatacatatggaacacttcacttcgtttcagacgttttcctttggcacgcaccaatgactcatcaataaaagcacagatactatctgacgtccgttgcacttctcttacacattctttgctgtgttcgctctccgtgaactttccctgttcgtacagatttttcaatgcaatcatcgccatatgaattgcataatcggattctgcctgtaccttttcctttaagtgcagatctttttcaccactttttactacccggttcatatcaagaatcagtagtctacggtaaaaagcatctgacttatcctcaagattctgcggcatttcattggtagaaaaaagcagcttcgcataagagtggaaatgaattgcatcctgtccttttttctcataaatcagtgtgtcctcaccgactgctttctttaatacatctgtgttctccattgctttgcatggaatatctgcacaggcatttaacagctttccatacattccagtcgcatagaatcgtttatttaaatcctgtaaagaaatactggacatattggtgattccaactacatgctggatcagcgatactgccacagactttccggttccaccatttcctttcagtgtaaggaatttctgaaactgcgtatcctgtgtcatgcagtatccaaaatactcccagaatgtctgctgttcttctttgttaggaagagacgatgccagatacttttttatattttctccaccttgtaacacctgctcacaatcttctggataatagggaaatggtatctgattgattgtcagataatctggattgtgttccaacatttcgcctttaaccggatcataatatccatttttgaaattgatccaccgcacaggttgtttatttagttcatatgcctctcggtgaacttttggctgtgcgatcagtagattatagattcttttgatcactccactctgtacctgatcacgatagatcagcttctggatacggtatttcattcttacaccatcatggtcttccaggaaaacaccatgctcataataatacggtgtgattcccaccacaaaaaactgaacattctccaccaggtaatctacaatctccatatcccggacacctttcacattcccttttgcatcaaataagtgaaaacggctcagttccggttcttctttcggatctcgctcaaaccgaagaatatactgttccagtaatttctcaacttctttctgattatccagtttgccaaggtactccttctctttgaacaactgccagcctgcttttccgtcaagaccagcgtctttgaaaaatgtcagtatcttatcatttacccacttcaccgtacaggaagccacataatgataggcactctgacagcttccagtaaactgaatagatctcatttcctctataaaggaatctgcactgaaataatatccgtcatcttcctgcaccagacaaagtgcctgataacctgacatcacaatattcaacgctatatcctgattgtccaccaaaaagatataggtctgtgctgtcccttctggattggtttccatataatgcttcaaaaacttcttgttcaaacttatcacttcctttcaggcaaagaaaaagacgcaagccatatcttatgactcacgccttacttcgctcacaatattctatttttatcagttacctgccagattagttactgacaatccttatacataaatcaattctttcaggataatctcttctgcaatcgctctgtgctgattggcagctcttacccatgccatctgatttttctccttatccggcagtggttctttttcttccaactgtttcagaatcacttcttcccgttccctggctgccttgtccacttccagaagatgctctccaatcgtatcctgcagaagcatcacctgataggttgaatttcgatggttcttcagataatctctgcgtaagaatccatatttgccaagctgctccatctgctcaccggatttataggtgaggttcggaatcaggtatccatttacatttgtataagtcagtttcatatccctatgacctctctttcgtttaaactgttgtctgtaacagaaccaactgttcatgttacgtcattgctacaaatctttctttccatatcattttgaatccaacccgggcagattttcttcaaaatcatggtaaaagtgcttcgtttctgtgttgggaaaatgaacggaaacacttgattttactgactttcttcaatgtaaccttattataacgtcctccccataccccaactccccattcggccacctctcataccccggaatctgtctcgcccctctccgcaaatatgctttcactttctctccatacagatacggatcattccctttcacaatcccccactccatcaaaagtgccgcgcttcctgtagcaaatggtgttgcaaatgaagttccggtgaactctgcatatcctccgcctgctgcaggagccattaccctcacacccggagcagccagatcaggtttgattgcactttccccctcgtatatctgtgtcggtcctcgtccggagaagtctgcataggaaaaggtcaatgcattatacgctgccacagtaataacaagcgatgcagtagaaggtatcgtgagtgttgtggaactgtctggttttagaaatgccgtaccgatattaagtgcattctgtaccggaagccacatttgccacaacttatccacaacccagtctggcatcatctgtattttccacactccggctgtgacaaattcattttgtggtagaaaactaatataaatttcctggcgaacactatatggttttggatctccatagtaaaccaggagttctgtttcaccaatctgtattctttgtgttccttctttttcttccagtctgccggaatgatttccggatggatcgacaattgtaattgcgacttcatcgacataggatttccaaatttgcaaactgaatgacttctccctctgctgtactgcaagttgaacttctgtcatcattccttttctatattcacctgccgcatgtcccgcagtcgttccttcatttccacttcctacacaaatcacattcttccaacgttcagatactgtattcaaatatctttccaaaagacttgttccatcatgggaaccatatgtattcccaaaactgatattgattgccaccggtttttttaactcttccgcttttcttacgatataatccacacctcgcatcagctgggtagttcttgggaatcctgtttcccctgctccccccatctttacaatcagcagccctgcttcgggtgcagctcctcgatattttccattcttactacctcttccatttccagccgcaatcccggctactgctgttccatgtccactggtatcacggcttggtacaatacgatacctttcttccttgacttccatgcgtagtgcttcatttatctgttctgaagtgaactctgttccgatatgatatccttccggcggtttaccgttttgtatcgtctgatcccataaagcaagaattcttgtcgttccatctgcatttctaaaatcaggattttcataatcaatcccactgtctacaattccgatcaatacgccctttcccaacagtggaaatgactgttttttctgctgattgtcctctcccccctcttgcctgatcgaagaaaaagaaggcgcagcctgtacttcatcaatacaggacacacgccttccattctctacttgaaaatataaactttttggtttttctataaattctacttcaggaaatgctgccagttcttttatctgactttcttttatttggataatggcatatccacctgtcagttccgtcacataaacagctcgtgttcttactcgctctaacgtctcggaatacttcacgatcaattcccattctttttcttccggatcatacccgatatccagactctcgcttttctgccgttcttcttctgtgatatctaatgcaagattcaattgattttctattttctggctcatgaaggctgcaaccttacctcatctcttatttctatgttttatgaagtaatttagcagattattccatttccatctctaagacaaccacctcacagcttttcagattcagcctcttctttgtataatttactgtctcgtccttctggttcgacaacaatacctttttcacatcaccttttaactcaatgcctgctgcatctgttccgaaattagctgcaacaagaatccatttcgctgcgtcttttcgataaaatgccaggatgtcatccatttcttcatattccggaatgaattctccatatgtaaatacggctttaaagtcatctgatttgcgcagtgctactaactttcgataataattcagaacagaatccggattgttttcctgatcttcgacattgatctctttgtaatcaggatttgtctttaaccatgccgttccttttgtaaacccggcattctccccgcttgtccattgcattggtgttctcgcattgtcacggctcatccgattacaagcttccattgcttcccggtcagatagtccagcttcacgggcaatctgatactggtcttttgtactgatatcatcgaattcgtcaatgctgttccacttcgcatttttcatgcctatttcctgtccctgataaatgaaaggaattcctctgagaagaagattaaccgtaccaagcatcttcgttcccgccggtgtctgggcataagccggaagaaatcttgacacacctctcggttcgtcatgattctctataatatttgctttaaatccatacttctgtgtttccatctgagactggaagattgcttttctccatttagaaaattccatcttcggagcatcataccatccatgttctccatcactgagacaatgtgcactaaagtcaaatattgttgagaaatgtccgttttctccaataaattccggtaattcatccgctttcatattgaagacctctcctactgtaaatgcatcgtatttttggaatgtatttttctttaagtcttccagaagttctccaacaccatctacactttcaaccattttccagcagccggccatgccatctgccccgtccggttcaaaatcaggaaatttcagatctttcttgatattaatgatggcatcgattcgaaaaccggaaagtcccttttccagccaccagttgatcatatcatagagtttctgtcttaatttcggattctcccagttcagatccggctgttcctttgcgaacatatgaaaataatatttatccgttcccggcaccgattcccaacagcttccgccaaaataagaacgataattactcggcggatttccattctttccttctcggaaatagaaataatccgcatattctccttccggatccgctaatgctttctgaaaccattcatgtttgtcagaacaatgattgattactagatccatgataatatgcatgtctcgctttttcgcttccgccagcaattcatcaaattcttccatcgttccaaattcttcggcaattgcataataatctgcaatgtcatagccctgatctacaaatggtgatttatagatcggtgataaccatataatatcaattccaagcttttttaaataatccagtttcgatatgatacctctcaaatctccgattccatctccatttgtatcaagaaaactcttcggatatatctgatatgctaccttatcatgccaccactttttttccatattatcatcctctttcatatcattttatttgccactcactgatgtaaccgtattgccagttcccatctcctgtattatactgctattatatgattgtattcgtatgaattcttgcattattttttcattatataacacaatactgctattttaggaggagatccgaatgaacgttccacattcactcatattagagcaaaaagaaaatacaaaacatggagaagtattctttccgatccaaaaatatattacaaaacttaacttaaattccccggtcattatgactcactggcacgaagaagcagaactcactttgataacaaaaggttcctgtatttatcaaattgatttagtcgagtatgaagtaaatgaaggtgatctgttattcattccaccactgcttttacattcgatccgcctgaatggaactgataatttctgctcagaaacctatgtgtttcatgttaactttttagggggaaatacaacagatatatgctccacccgttatcttacacctatgataaatcatgaattgaccttgccttatcatatttcatccacacaccctgcacatcattctcttcatgaatgctttataaaaatggcttcactctatacggaacaaacatttggatatgaaattgccctgaaatcagtcctattgcaggcactgtttctcttacttcaatatagcaccacggagtctgcaactatttctgcttcttcagataagctgaaaaatgtactcgattatatcgatctccactatgccaagcctctcacaatttccgaactcgcagagctttgctatttcagtgaatatcattttatgcgttttttcaaaaagcatatgaacatgacctgcatccaatatattaataatgtccggctcgaaaaagcagtagaattatttgaacatggagaaacttccatcctggaagtctcactctccgttggctttcataatctttcttattttcacagagcctttaaatccaaatatcacatgacaccattatcttttatcaaaagactgaattaatgttttgctttaagaaaagcagcggctgaaacttccattttcagccgctgctcctataaattcaatcttctattttttctttcttcgtctcttcttgattaactttcgaatcaatactaccaacagaataatgatcagaataaggaccagaacgataccaacgatcatcactgaaaacttattcggattcttcacgagatcgatcacatttctgctttcatctacaactttacgtccatgtgtcgtctcataatactccggcacatttgaaatgccgttgccatctgtatcatcaaaagacttcatatatcttgcgatcgcatcccatgctttcagctccttatcgccttccatgattgcctgatcttccagattctcgattggattaccatccttatccttcggctcgatcttcaacagaccataagacatttccattacagagccaagcatctgtccggtataaagatctgtcacaactcggtataactggtcatcctggatctcgattcgctctccatcttctcttgtcagataacagtctgttactttattcaagatcattcgatgcggattgaatgtgaaattcagcccgctgcaatataatcttgcagttgtcataaaatcggaaaccgaagcgtctacttctgctgccagtttcaattctttaccagtcagataaacatcaatcaacggatatcctgccagtccgtcttttcctattccaagtgaaaatgaattatatacatcttctacagtgatatttccttttgtatatgtatcgcgcacacagccacttggaacgacagctacatccaccggcgttccattatagtcttctgaatgctctacagaatagatatacgaatcagacataatatctccaagattcagttcttcatgcttcgtctccatttctccgagactgttgaattcgacatcattctcggcaagaacttcatctcttgtatatccgaaattcgtcagataattagtatctactgtatccatcagcgcatcgatccgctcttgtgtcgcctgatccggctcaatatcttcagataccggaatcaactcgtaggaagtcatctcccagcgaccatcctgtttctgtgtcatggaaagtgatccaagatttcttgcgtattctccacaggatacaatgtaagtatttccgtgctgaataggctcttttaactcggaatgtgtatgtccgctgatgatcagatcaagatccggtacttcttttgcaaggatctcatcttctgattttttctcgtcctcccaggttccgctgtgagacacacaggcaatcatatctaccgtttcattcttcttgatctcttctaccgttttcttaactgactcaaccggatctttaaataataattcacaggtcggtgcacattttaaggcatctactccaaatacacctactacagcaatttttacatcacctttttgcacaacaacataattcttcacaccatagttttcaaatgctgactgaatctgtttctgaccttcactcaatccgttcttttccatgctttcccaatcaacattacacacgacaagactcggtaccgtctcgccggaattcttcgccgctgtcaacatgtctgccagtcccttggaacgataatcaaattcatgatttccaaaagttgacacatcgcatccgagatatcccagcatcctaagttccgctgcttcggtatcataaactgtctggatcagcgtccccattgaaaaatcaccgccgtccagtatcagtgtatctggattctctttcttcttctcgtcaatcagagtctttagcttcgcaaatccgccgacttctttctgttctccatctacaattgttgaaaagctgtttaaatgagagtgtgtgtcatgcgtaaacaaaacatctaactgtttgctttttcctgccgcttctgccggaatattcattacaaatggaaggagcattgtaatgatcagaaagagcgccagaatcttttttcctcttttcataagttcttttctcctctcaaaattcgtggtcactgggctgaaagccccgaaactacggtatttatttcagcgactacatatagtcgctgtagttacttatattctgtcagttcctcataatcaagatcttcaaaattaattgcaataatctgctcttcgtccacgccatgctgttttagataatcctgataaatctccaatagtattgattttccacatcgtctcacctatgataatgtaaaaagcaataatattcaatagtttttgcatcgcaatgtaaaaactatataaattttattgttttttgcattctattaacttttatagattctattattatttctaagattttataattttattactagactaaggcaaatcgattttattttctcttaattgcattcctttacattcagtgttagaatttatattattgctctaaaatttttactgcaaaaataaacagggataaaaggataaagatactatgtttcagatttttgttgactcggcagccaatctgccggctgtaactgcaaaacaatacgatattaacgtgatttctttcgtcaatcttgttgacggcaaagagattacctgttttgacccggatctttcaccagaggaagaacgtcaaaaaggaaccgaatactatcaggccatgagcaggggctgcgaaatcaaaaccggactgatcagcactgctgcctttgaggaagcatttcgaagcgcactcgaagcagaccaggatgtattatatttctcactgagtaaaaatatcagtggtacttacaattccgcaagattagcttcggaagagctgttagatgaattcggagataagcacaagattcgtctggtcgactctctcaatgcctcacttgcccagggaatccttgccgtctatgcaagcgagatgcgtaccaaaggaatgtctgtggatgaggtcgctgatactctggaatattatgttggaaaaatgaacggagtcttcactgtcggggatttaaaatatctttcccgcaccggaagaatcaaaggaagcgttgccaccatcggaaatgttcttaagatcaaaccaatcttacgtggaaacaaagatggctatatcgtttcttacaagaactgtcgcggacgtaaatccgcactgaacgaactggtcaatctggtctgtaacaacattgtagagccagaaaagcagattctcgggatcgcacatgcagatgcatatgaagattcgctttacgtcatggacaagatccaacagaaaatcaaagtgcgtgattttataaatacttcttatgatttctgtaccggaagccatgtcggaccggatacgattgcacttttctttattggaaaggacagggaactttcataaagtatgtagataataaaagaggaacaagcccattggcaatacacatgccacctgctgttcctcttcatttataaatctgcccgttttttcaaaaacttctgaaatgcctcattgcctaaaatccaatgtgcaaatcaagaaaaccaggaagaaaatatccctgtgggtgcttacataccggacataatgcaggtgcgtgctcttttccttcgtagatgtgaccgcaatttgtacaaatccatttttttgttccatccgcattttcacacatataaaacgtgttattctccaggctgtctgcaatcttacggaatctttggctatgtgccgcttctatctctgcaatctgctgaaatgttgctgctacctcaaagaatccttcctgtttcgctacatctgcaaatgtcggatacacatcctccgcctcttcctgctcattatgttctgacgcacgcaacagctgaaccagagtcttcgtctcatctaccggataacttccatcaataaagatattcgttcctgatgcttcttttaacaattcatagtatcttcccgcatgtgcccgctcctggtctgctgtgtatagaaaaatatctgcaattgcaggttttccttctttccgtgcctgctccgccgcaaatgtataacggtttcgcgcctgtccctctcctgcgaacgcacgcatcagattttgttttgtcttgctttctgaaaataaaacagccatgtcatatacttcctttcttcaaatcttctactcttttctaaaagctaaattcatccaaatcagtatatgccatgactggtttattaattcacctgtcccaaatattcatagaaactttcttatttagttaaatccaatcagtcttcttgcaaccgtatacgcaagtgaagacactcttcttcctgatcttcccggaaggttcatcgtctgtccaagaattccataacggatcttcatataagtcctatagtcttttttcttcagataagcccacagttctttcttcttctcgagattctctttcttcttagagcgaatacatagaatagaagaaactgtcatcatgattgccagataattcaccatatattttctcagcttcttgcttccgatcagacgcagctcatacatggaaatcattttcttcgttacgaaaagctgctggtcgattctgctgatcatcaccttctcattcactgactgatcctcacgtccgatgaaatatctgtaaagatccacattcatataataaagtgtacggacatgcggcagcggataatacacataaatgttgtccacatagaaggtatgcttcggcaattccaactgacaaagcttaagcatctctgtacggtaaatgacagaatgcatcaggatatactgatccagacggaaacgtccgatatcctcccatttaaaaatctgattctccggaagaacattgtcataacggataaccttcttatgtgtcatgccaactttctcataaacatagttcgcaatgaccatgtctacttctgactcatctttcacaaatcctttgatcgtatcaagaatcttcaacaatgcttcctcgtctacccagtcatcactgtctacaaccttaaaatactttcctgtcgcatgagccagtccacagttcactgcatctccgtgtccaccgttcggcttcgcaactgcttttacgatcgtcggatatttttcctgatatcgttctgcgatctcctgagttccgtcttttgaaccgtcattcactacaatgatctcaacatcctcgcccccaacaagaatggaattgattgccttttccatatatgcctctgaattgtaacatggaattgcaaatgaaatatatttcatggtttaacctccattttaaaatgccgcctttggcgtcgcttccttttcttttacgctcattatagcatcttttcgacttcttgttgtaaattttctttttttcagctatagtaataacgaatcgtcaatatattattgagctcttatcatatattgacaacagaaatcgactatctcaacttaaaccaaaggagaaactttatgaagaagaatgcaatcgtcggacagtccggcggaccaaccgcagttattaacgccagcctgtatggcgttgtttatgaagcactgaaccgtgaggatgtcatcgggacaatctacggaatgatcaacggaattgaaggtttcttaaacgagaacttgatggatatgaaaccgttagaggtcaatggcgaacttgaactgatcaagacaacacctggttcttatcttggttcctgccgttacaaacttccggaagacctgacagacgccgtctatccgcagctctttgagaaatttgagaagtataatatcggttacttcttctacatcggtggaaatgattccatggatacagtaagcaagctttcccgctatgctgagactgtaaacagcgagatccgtttcatcggaatccctaagacgatcgacaatgaccttgtcctgacagaccatacaccgggattcggaagtgctgccaaatatgtagcatccacagtccgtgagattgcgatcgacgcttctgtttatgataataaaaaatccgttacgatcgttgagatcatgggacgtcatgccggatggctggccgctgccagtgtccttgcccgtaaatttgaaggcgacaatccggttctgatctatcttccggaagttgcatttgatcaggaacagttccttgcagatgttcagaaagctttcgagcatacttccaatctggttgtctgcatttccgaaggaatcaatgatggaaacggtaagtttgtctgcgagcttgcaagtgatgtaggcgtagatacattcggacataaaatgctgacaggttccggaaaatatttggaaaaccttgtaaaagaccgccttggcgtgaaagttcgttccatcgagctcaatgtcaaccagcgttgttcttcctctatgctctctgcaacagacgagaaagaagcgattgcttccggttctttcggtgtacagactgcactgaagggaacaacaggaatgatgatcgccttccaccgtacagacgatgcggattaccacattacttacgctccggaagatgtaaatctcatctgtaatcaggagaaaacagttcctttagactggatcacaggaaatggttccgatatcggacagcagttcatcgactatgcactgcctctcatccagggttctgtaaaagtaccggaagaaggcggactaccgaaatttgcttatagaaagtaattatatcaaagtcttaatataagagagaacaaaacagagagaatacgtttgtaacttgcgtatcctctctgtttcgtttttcagagtattcttcttaactatttttcagcacacattactttgcagctcgctcatccagcagattctgaacttcatctcttgtaggcattacgcgcagtgcaccttttcttgttgtgatcacagaagctgcggcatttgcaaatgtcagcatatctttcaggttttcttcctttaagtcctccattccatgttcacagatataatgtaatacacaaccgcagaatgtatctccggctcctgttgtctcaattgtatttttctgaaggaacggttttacctctacaatgcttccgttatagtatgcacggcttccttcttttcccatagatacaagaatcagcggaatctgatatctttctctgatccagtttacacctgcagtataatcctcttcacctgtcagccactgaatctcattgtcagagattttaagaatctggcaatgtccgagaccgtataacacctgctcttttgcctcatccagtgaattccaaagtggaggacgtaagttcgggtcaaaagaaataatcgcactagactcttccgcaatacgaatggcttcttttgttgcttcgcgcactccttcatgtgtcatagacaatgttccgaaatggaagatctttgtttctttgataagttcttcacaaatctcttctttgttcagcatcatatctgctcccggattacgataaaatgaaaaatctctgtctccgtccggataagtatgtaccatagcaagtgttgtatggatttctttatctgtgcataatccggatgcgtcgattccaacttctgtaattgcatctcttaactgctctccgaaaaagtcttcacctacttttccgataaatgctgtcttatgtcctaaccctgtcaacatcgcaagtacattacacggtgctcctcctggatttgcctcaaaaagaggatttccctgattgctctttccgttttctgtaaaatcaatcaataattctccaagtgctactacatcatattttttcattttcttctccattctgctgccaaggtgacaacatttttctattctcaacagatttctattttttcacacaccatctgtactgataaggattcatccataccgaattcatctccagtttttctcctgtaaataaatcttcatattcaccttccagacaattcagccaggcattctgtccatactccgagaaattagccagacagatcagttcttctctccctgctgtccttctgattgcgaagactgaagtatttcctgtatcccatgtagagataccggcagtctctccaaagcaattttcctcacgtctgaattcttccatctgtttcaaaccattccagatcgcatactgtacagtacctggtttttttctcttctctgcattctcccactggaacggacttcgatgcagatatcgactgtccgcagcagtatccggatttttcttataattgtaatcattgacctgaccaatctcatctccggatgaaagcatcacaaaaccttccatgctcatacatgccgcatgcatcatcagcactctttggattccctgtttcacctgctcaagatctccttcaaatccacctttttcaattccacacagacttgccgttgttccacagcttctggcatctttggtcaccggatcgtaattatagagctctccacgagcaaagctgtacggatatgtcccctcaaagaaatgatataaatattccttgtgctgaatcggatctatctccagcttcttctcctgctcttcatccaggccccagccgatatcatcatgacagcgaaggtaattgacaaaatagcagttcttcggaagactgtgaatcacatccatctgatgcttcagcattcttgtgtctcttgtagccagtgctgcccacagattcaccatactggaaacaccgtataacatatggcattccggctcttgctctgttccaaaataaaccggaagttcttttggctccataacaacctcgccttttaaaatcacacctgggcaaaccatttcaaggatcatacgcaacatacggacgatactatgaacctgcggaagatttctgcagttggttcccaactccttccaaatatacggaactgcatcaatacggaatacttccactcccatattagccagatacaggatatttcctatcatttcattaaatactttcggattgtgataattcagatcccactgataaggataaaatgttgtgagcacatgtctgtgcatctcttcgcaccatgtaaagttgcccggcgcagtttccgggaacacctgcggcatcgtcttctcaaactgatccggaatctcgcgtgtctcataacactgatagcgatccatatattcctgttcgcctctcttggctcgcatcgcccactcatgcgtatctgctgtatgattcataacaacatccagacacagactgattccgcgttttctcagctcttttgtcagcttttccaactcttcgtttgttccaatttcaggatctacctgtttaaaatcctctaccgcatagccaccgtcattatatggatgcggcatcttcagaagcggcatcagatgaagataggtgatcttctgctcagacaaataatccaaatgctctatcacaccatttaatccccctgcaaatagcttcggatacatcgttatcccaagcatatttctgtttcgataccaattcggttctttttctcttttattatctaaccgtctaagttcaacaggtctgttctgataagcctcttccaatgactgcattaattcttcataacattgttcattatgatacaactgcatatatttttcgtgcagttcgttttcatgtctttttcttcttacttccatcatcaatactatgctcctatactacataaggggattccttaatcaggaatcccccctatcattatccatgcattttcaatctcaatgtatatttatcatgtaacttctataccagatcatatttcactacatcgattttagctgcaccatcagcaaagaatgaaattccgtttgcttcctgttctgtaaagataacagcagacataacctgctcgccatcgttaataaatacttctgcgctgaatctgtccagaatcacacgaagcttcaattcattggcatctccgttcacctgacatcttctctgatgaaccagtgctcgttcggttcctgaaaattttctgtcaattttcaatacagactcatacgggcggaagctcaattctgtatggaatttctcattctgtgcaaaacgtaatgcgaatttcttatatacattttctttatcttccggacgtatcacgagttccatgtcgatggttcgtccttcgacgcgatctaatgtgatcgtatcattatctattactacatcgttgtactcaactctgtttttgcgcattgtatcgagttctttgattggagtttgataaagtcttccgtttttcacagacaattctctcggcagactcatttgcgcaaaccattttgagtcgttacaacgatgagcaagcgtatcccagttctgcatccagccgatcataattctgcggccatccggtgcttccactgtctgcattgcataaaaatcaattccataatccacagactgattgaactgctcttttaaggtatatgtatccttgtccatttctcctatgatacataaagtgccgtttccgctatgatattccaagccttccggcaacatatcctgcggacttgtcaggagaatgtgttttccatccagttcaaagaaatccggacattcccacatttttccaaaacgtttcttattttctgcaaggatgctgacaaattcccagtcaaatccatttgcacttctgtaaagaagaatctgtccgcttccatctgccggtctgcttccgatcacacaatagaagtttccatcttttcctttccagatttttggatcacggaaatctactttacttgcaccttccggaagatccttttctgttaaaaccggattcttctcgtatttcacataatctcttccatctccgacagctaccgcctgtgtctgtatatctcttttacttccatcttctaatgtttcatgatctacggctgtatacataagcaattgtctgccatcatccagctctattgcgcttcctgagaaacagccaatcttatcgtagtcttcatctggtgcaagagctgccgggagatattcccaatgcaataagtctttacttaccacatgcccccaatgcatactgtcccaatgtgtatcgtatggattatactgataaaataaatgatattctccctgatagtatgaaaatccattcggatcattcatccagcctacatacggactcacatgaaaagccggtctttcttctgcttttatctgctttccctgttcatcttcatattttctagccttttctaacatctcactcatgcaaattctcctgttgttcgtatcgttatttttcttcactcaatgacttctgatactcatcaaagtacttctgtttaattgaaagataatctgaaagcccatactgttccattttctttagataggaatcccactctttttcaattcctccattcaggatccagtctgctttcttctgttctgcatatttttttatatctgtatcgtactgagatactttattcgtatcatcaatgctcataaagacatttggataaacatatttactgttcatatcctgtaaataagtttcatgcatattatccaaacgccattttgcatcttctggctgtgttacatatacatcataatattcatttaaaactgcaagagggccatttaccgattgtgcctcacgcacttctaccggagactgtgttccaagatccatatgctttagcatttctccaccatctttgtttgtggacagttcaaaaatgttaaaggagtccttttctccataagttccccagttattctgtggtgattgaagtggtgcatacatctggtcaatccatgcagcagcaagtgctgtattccgacaacttgatgtaagaacacatcttccacggtcaaatccacttgtttcactgttgttctgtctcgtgatatttctcataccattcggtcccgtcagcgccggtagcatcacataatcttcattgttatcaatatttgcaatgtcccatgtaaaacagagaccgtatcgatggttcttaccttttgctacataggtggaccactcttgtgtaaatgcttctgggtcaactaaatcctctgtcacaagtttatgtaaccattcaattccttctttataaccttcctgaacagttgtgtaaataacttttccttcatccgttacagcgaaatgatctcccgtatctccataaccttttccaaatccattgattaaaattgccggatcttggtctccgttattgataataaatgacattggaatcacatcaccttcaattgaaaattctttttcaagttcatctgcatgatcacggaattgaatcaatacctgttccaattcatctgttgttgtcggaatctcaagtcctagataatccagccatttcttgttaatatatggaatatctccgattgcctgaatggcttctttcccggctccaagctgttcaatccaagggaatgaataaatatgtccatctggtgctgtacacattgtcctatattctggatatttttcaaatactgcctgtaaattcggcatatatttatctatcagattttctaatggaataatgataccctgctttgcataacgcaatagatcataatcactcattcctgcattgaataatccgtccggtagatttccaaattgagcaagtgccagattcttcttatcagaaaactgatccgatacaaaacatgtccaatcaatatgaacattcgtctgctcttccattctctgaaagattactcgttcatttggctcctgtgttgatgtagccggtgcacttgtaataaaggaaagttctgcagtttccttcaatggaaactgcacttccgttgcaggtgtatccgggttgatttcagcttcaagctgctgctcttttccacaacctgtaactcccaccagcatcgtcagagatagtacaattgcaagtaatgcatttacttttcttttcttcatatctgtatcattcctttcttattagccttttaccgatccaaccataattcctttgtcaaagtacttctggaagaatgggtacattactaacagtggtaaacttgatactacaatggttgcatatttgagctgttctgctatttttgccatttccgctgtgctctgaatatcggcaatcatgcccggctgtggtgtattctgtactaagatagaacggagtactaactgtaatggctgcaaattcgcatcattcaaataaatcattgcgtcgaaataactgttccacattccaacgaaagaccaaagcgccagtactgcaatgattggcttacataccggaatcataattttaaagaaatgttggatttcattcgctccatcaatcgcagatgcttctcttaattctgttggaattgactgataataagttcttgcaagaatcatattccatacattaaatgctcctggaatcaggattgcccacactgtattaactatatgcagttgattgatcaaaatgaatgtaggaatcattccaccgccaaaaaacatagtaattaagaaaataatattaaaaacctttcttcctacaaattcttttttggacagcggatacgctgccaacaatgtcacaaaaacagaaataactgtaaatgcaagtgaatacaggaaggaatttaaaaagccacgccagatcatttcattctctaatactcttcgatatgcatctaatgtccagtccttaatattaaaactcaatccctggttattcaaaacagtcggatccataaaggatgcaagtactacatagataatcggtattgctatagaaaggacgaataaaccaagaatggtaaatccgattccaaggattactttgtctgtccttgaatattttttcttcttttttttctccatctcttctccctcttttctataatccttctccgtcattcagtttcttaacaacctggtttacaaagatcaacaagataacatttataaccgaattgaagagacctaccgctgtcgaatatccataatctccgttcagaagtccaatacgatatacatatgtagacaggatttctgatgccggcaagttcatgtctgtctgtaaagcatatgctttttcaaaacctatactcataatatttccggcctgtaaaataaactgaattacgataatatttttaattgccggcaactctacataccagatctgctgcagaagatttgctccatccatggtcgctgcttcttccagctccttgcttgcatttgccaatgctgctgtatacatgatagatgaccatcctgctgcttgccagattccgcttgcaatataaattgttcggaatgcagaaggcattgtcatccagtttgtgctaattccgagcactttgttcagcggtcctacaggtgataaaagcatacgaaccataccacaaagtacgatgactgaaataaaattcggcatatagatcaaaagctgaactttctttttaatccctgtcttacggatgcgatttagaagcaatgcaagaataatcggaaccgagaacccccacaacagtccatagatactcaattttaatgtattcatcagataattcataaaatccggtgaagataaaaatcgcctaaaatactcaagtcctacccagggactaccaagaactccttttattacattgtagtcttcaaaagctatcaggagaccacccattgggagatacttaaaaataattgtcagtaaaagccctggcattaggaagaaaagatataactgccagtttttcttcatataagtcatcttttctctccacgttcgtttgcttacggactttgcttgattttgcattcttttcatgcacttcttcctccattcctttaaccttatggaaaaccggttacgtaaccggttactttatagtttgatattactatattcttctctttctgtcaacactttcgcgcgataaaataaccggttacgtaaccagttattttaatgttgcgtttttccatgaaaattgctatactaaaagatattatgaaccatcagccatcatattgaaggagattcaacttttatgagtaaaaaacaggtaacttttgcagatattgcggagtacaccaatttttcaaaaactacaatatcaagatatttcaatcacccggattcactgacggttgaaaaccaggaaaagatttcacaggctcttgatacacttggatataaaaagaataagctggcaaaggttctggcaaatgggaaaagtgaatttatcggaatcattgttccaaacctttatctgcactattattctgagatgctgacacaattcctttccagttacagtgattatcactataaatttcttgttttcgccagtgaacatggtgctgaagaagaacaacagtacattgaagaacttctgtcttatcagattgaaggactgattgttttaagtcacactcttccatctgagaaacttgcttcctatcagattcctgtcatcgcaattgaacgcgaagcagaatatatcagcagtgtcaatactgataactatatgggtgcacttcaagctacttccctgttgattcgggataaatgtgacatattaattcatataaatgtcaatgtgaataaatccatcccggcttatgaccgaatccgagcctttcaggctacttgcgaagaatatcatattccatatgatatagatcttagtgtagaaggtgattcttatcatgagattttaaacgtaatccgagagattttcaataaaatagaagcaaaatatcccaatcaaaaaaaaggtatctttctcgcgaatgatacctatgcaaatatgtttcttaatttaattttccaaaaatatggaacatttctttctacttatgagatcgttggatttgacaactctccgattgccagcgaggcaatccttccaatcacaaccatcggccagcagattgatgtgattgcaaagactgccatggatcttcttgtccaacagatggaagagcagaaaaagcgtgttcccaaaccattaggtgaacctgttcataaacaaattgcccctgtattaattcgccgtaatacaacaaaataattttttttcatgattgagaacgttgtctccagcgccaggacctgattaccggttccggcgctgtcttctgatatctgcagatactgagcagtaatccgagcaggatataagatgtcagcatacctgctcttcctgttccaaagaatggacagtagattcccatattacagactcctcccagattttctaatataaaaactacggtctgaatcaggaacaatgctgtgcatcctgtccccatcaccataccaagctggttcttctggtttaaagaaatcttagcaaaccgaagaacgagcactaccagacagagaaccaacaacacgcctgccagtattccataagcagctaccacactggcaagcagatggacacttccgtctacagatgtcagaagttctttaaactgcggattgccatgaaatgctgagcttccggaaagcatttcccgaatcacattgacgcttgggaaatctgctgcatgatcaccgattgataatatagccgctatacgctctttctggtaagccttgccaaaacaccagaggcctcccgcaagcagcaccggtatcagaacgactactgctccgattcccgtaagtactgcttttttacaaacctgaaaccagcctttgtggacagccaccgccaaaaccacacaataaaccacttccagtatcattgccccaatcagactctggcttcttataatcaggaaatatgttggaatgaccatccaaaggattgcctttaaaattcctcggtatccctgacctctgtaactatataataccgctgcaaacaacggaattgtcagccagagtaaatcaatcagattcaatccaatgccgaatggcattctaatatatctggttgatccattcaatttcaaaccggcaacctgcagtccaatgaaaagtaacacctgatatgcgatcaagcttggttttgcataaaccgcaatcctcgtataatccatatagcaaataccaatcatcagcacaagtccaagcaaaagtgccggcagttctagcgacgtatgccaactggatgacattcctgtccagaacaattcttctgtttttcctgcactctgctcaatacctaaagcagtctgatacataacacttcgtaaaagatagcctgcaaaacttaatccaacaatcagcgcaatcattccccacgccattgtcggccggtagattctatccatctcaagcccaacttctaccggatcacccatttctcgaaccgcagcttcttctgcttctgtctgactcattccttcacttaggaattccgctttctgatcctcaatgtgatcattgatctcctgttctatcgtccctcttgccatcttacagcgaatctgttctgttaatgtatgtaaatactcctctcgtctcatcaaacatcaccccttctaacaaactgctgcattcagcacattcactacagccgatgaataaattttccactcttctttcttctcttctaaaactttcctcccggttttcgtaatactgtaatacttacgaaccttaccaccgacctctttctcataaactgtcagatatttcttatcttccattccatgaagcaatggatataatgtgcctgcttttaattcaaacacattctgggacttttctcttaatgtctcgatcatctcataaccatacatatccttttcagataaaagctttaataataacattgttgtacttcctgataccagacttctgtcaactgccataacaattcctgccactcaaaatgtgattaaatatactctcaccgagataatgtagaccctcacgagttctacttactgctttatcgtgtatgctttggattgatcgaaatcatatctactcacaagttcttgtacactccacagtcgtaaattcccgaaatagccttcggtacatacctacgtttgcgtttatttatgcaacttcgtaagtcatagcatctctcaaattaagtgcagcattgaaatctctgtcttcgatataaccacaatcacatttgaaaattctatctgaaagctttaaatctttcctgatatttttgcagcaatggcaggttttagaagatggataccatctgtctgctacacgaagttcaattccattttcgttgcatttagcttgaagttttattctaaactcataaaacttctgtgacgcaactgcttttgaaagatgtctgtttttcatcatgccttttacatttaaatcttcaatcgtaatgtaggatggtttggttttcactatctctgcgattgttttgttaatgtagtcggtgcggatattatctatcctatgatgaagtttctgtaccttgagcttttgtttttgtatattcgctctttgagtggactctcctttctgtgaattttcatattttcgagaaagacttctctgttctcgaataagttgtttttcaagtttctttaattttgctgatttgttaatgttcttataagttttgccattagaaacagtggcaaaatcctttaatccaaggtcaatgccaattccttcattggaattatcagctgtcttgttatctggcagttctacaagaactgaaacataatatctgtcagcttttattgaaactgtaccgcttttgattacatatccttcttttgttgttggaatatatcctttctctttgatgcgaacccaacccaaagttggaatcttaagtctatgcctttcacacacgcaatcctttggattatttctaacgaaatacatttttacatctgatttacctttctttttaaatttaggaaaatcactctgatgtttaaaaaatcttgtaaaagcagtacatccgtcttcgatggatcttttcacggcttttgaatacacttccttaatccatgctttatcaggattatttggaatgtattcattgttaagccatacactgaagctcttaccagtcataaacttttcacctttatcatacaaggttttgttgtgacaaaggtagaagttatagacatatcggcaagtgcctatcgtcttgtgaatcctgattttctgctccggtgtgggattgatttccgtcttgaagctctttaacaatttcttcatccctctctatttgttttttatacttacggagtccatacaacctgcaggagaacacatgaagaatagaaacaatatcctgcacgagttcttcttgtggtgatagttcttcattgtttactatcactatggtcgtattaaacttcatgcagaatttttcaaaccaatcatagccaaatctgataaatctatctttgtgcgttatgattatggttttgattttttgttccattacttcatccaataatttattccacttcttacgattgtaattcagaccacttccatattcttcaatacattggtctacaataatgcctctggcattacagaattgacgtaaaaacgatacttgattctgtaaatcatccttttgattctttgtagaaactcttgcataaataactacttggcgtatatcattttgggtttttatgcctttaaattgaagatattggtcgtaagtataataacgcctatcagttggagtccgatttgcttctagaattccttccctgtcccaacgctgtaatgttttcacagaaacacctattaattcagcaaaatcttttggtttataattcgtgatatttgacgtgttcataataatacctccataggtacatttaaacacatttaaccatattaagcaatatatttagttacttataaattcctccttctgattttacgttaaccgcacacttcttaacattctccttgcgaaatgaaactcatcttgcagtaaatatatcggttatctatatatcttagtttgattatatatcgattatctatatatgtcaataaaagcttccaacattctttgcattttttgttttttgaatacaaaaactatactctatgtgaaaaatatgttataatttgtgtacacattatgcagtataaatacatactagccatacaattcaagttgttgaactaatttaggaggagaactatgactgattctgttacaaataagatcattttaagtgccgacagtacctgtgacctggatcaggaactaaaagaacgttatcatgtacactattttccactccacatcattctggatggaaaagattataaggacggcattgacattacaccggaagaaatttatcagaaatattacgatgaaaaaatccttccaaaaacagccgccgtcaatgttgcggaatatattgaacattttaaaccatgggtcgatgaaggctatgaagtgatccatatcaatcttggcagctcactttccagtgctcatcaaaactgctgtattgctgctgaagagctcgggcatgttcatgtgattgacagttgttctctctccaccggaaccggacttcttgtaacagatgccggtcggatgatcgagcagggaatgaaagcggcagatattgccaaagcccttcgtgaacgcgcaaagcattgccatgccagctttatcctggatacattaacatttctccatgcaggtggacgctgttctaccctcgctgctctcggagcaaatgttttgaaattaaagccgtgtatcgaagtcagcacagcagatggcagtatgaatgtaggaaagaaatatagaggaacgcttgataaagttcttgtgaaatatgtaaaagacaaacttgctgcttatccggatatcgatccatctctgatctttatcacgcactcaggaatcgcccctgaatacattgaacttgttaagaatacgcttgaagaaaccatgcattttgatgaaatccatataacgaaagcaagctgtacgatttccagccattgtggaccaaatacgcttggaattttatttgaaacctactaaggaggagacgcctatgacgaatacaaaaccagtttttcatggaagtgatattgagaaaatcagtgagtattatcatatcgaccaaaacagtattacaaactttgccggaaatgtaaatccactcggactttccccttctgttaaggaagctgttgcggctcatgtggacctcttttcttcttatcctgaccgagattataaatcacttcgcaacacaattgctgagtactgcgatgttcctgctgatttcatcctgccgggcaacggttcaagcgaactgatttcacttttgattgaaacaagagcaccgaaacgcactctgattcttggtccaacctattctgaatactccagagaactttctttctccggaagtacacaggactattatcatcttcaggaagcggaagattttgaattagatgtagaagatctttgccggactttgttaaacggatatgattttctgattctctgcaatccgaacaatccaacttcttctgccatcttaaaagatgaaatgcgtgcattgctttcattctgtgcaaaccgcgatatctttgtcatgattgatgaaacgtatgtagaatttgcaccttccgttcaggaagtaaccgctgttccatacacaaaagatttctctaatctcatggtactgcgcggtgtgtccaagttctacgcagctccggggatgcgttttggatacggcattaccggaaataaagagttcttatctcagatgaaagaaaagcagattccatggtccttaaacagccttggagcatatgccggcgagcagatgttcaaagacacttcctacatccgtcagacacgctcattaatcctgacggaacgtgaccggatgtttcttgaattaaaaaagatgccttctttcaaggtttattttccatatgggaactttatccttgtgaagattttaaaaccagaagtaacttctttcgatgtattcgaagcttgtataaaagaaagacttatgatccgcgactgctcttctttccaatgtctggatggcgaattcatccgcttctgcattatgaaaccagaagacaataatcggctcttaaaagtattgaaaactatttaatgataccagggtcaaaaggtctgaaaccaccggtgcttgcacaaaggtctttcttaaaaaacgggagaatctgatccaacgattctcccgcttttcttcttattctttcttttggttttgtacttccttgctttttctatgattctacagctgttttctaacaacaagataatcatctccattccgataatatggacattgataatgctgatttgtcatcagacggatgtaatcatcctcatccatattcttatcacagagataacactcatactcctcatcataaatataataagtgcatgtttcacagctggttcttgactctttactcaattttctctctccatttcccgcccgttgcaaggacctgtagcattgcattctgttgctgttcgttctatgtgcagctgacaactcttttcttagtatcataccatgttttcatagattgcgtccacttttctgtctaatgcaattaccttaggcgcaactaatagcctgtattttttgtgttttatttcttattttctgtatatttgaattatttttaacttttttctgattttctattgacaaatgcctatctgtgagttaatatagaatcaacaaaaggaaacgaaataaaaaacaaaaaggaggacaaaccaccagacacttaatcctttcattaaaattaattttaaagaaacagaggtatagtccaatgggaaggtaaattaaatccttaaaaatctaaagaaagaggtacaggccaccagaaagagtaatttaaaaaacggaaacgatatttaaagagagagaggtagaatccaatgggatagttcattaaatcatcaaacaaataaattgaaagaggtaaattccaatgggacgataagtaaaaatccaaaatagataaaagaagaatcgaaagaaggatattccaatgggataattaaatgaaataaaatataaaatcactatttgagataatagtttcagatagatatcaagtaaataaggaggaatattccaatggatggaataacaaagtgaagatccactgtatagcgtaggtgcatacggtggattttcttttgtctctttttcgtggatatcccggataatcagatggaggaaacaaaaaggggcaaagctttttatgcttccacccccatcacttaaaaatgtttaaagtcttaatacatagtctttttattatctcttcacaaagtactcttcataccatacgaggaacgtatagattgtccatacttttctccagttatcagaatttcctccaacatattcatcaaaaatcgcattgattgcatccacatcaaagaatttctctgcaatatcactgtggaagagacgctgtacgtcctgattatatctctcatcagccatccagatacggattggtacgataaatcccaacttcttacggaatgcaatttcttctggaagaaccttcgcagctgctgtacggaatgccaccttattctgctcttcatttactttaaagcgagacggcatacgagatgcgatatcaaaaattcttctatctgtcaacggcatacggatctcaagtccggctgctgtactcatcttatcaacattcaggtaaatatcaccttccagccaaatctgaatatctacatcagacatctttgtcaacggatcaagaccttctgtctcctcgtagattcctcgtgcaagttcaattggcagtacgtctggatcgtatttcttaagaatcttctgcttctcgtcttctttcatgatattggtatttccaacatagaaattcttcagattctcaccataacgttctgcgtttctgtacatattataaccaccgaagaattcgtcagaaccctctccggaataacagatcttcgtatgttctgctgttgcattacatccaagtgtaaatacaatcgccgatgcatctccaagcggctgctccatattgtacattacataaggtacaatatcaaagaactgctccggtgtaatgatacttctggaaaattttcttccaagaagctgtgctgtcttctctgcaagaacagattcatcaaatctttcctcttcataaccacaagaatctgcctgctctgcgtcagacattgcaagtacataggaagaatcaactccaccagacaggaatgattctactttttcatccgctgtttttacctctggcatgatctctttcagagtattatgaatctcatcagcccaatcttccagagtcttgctctcatccggatgaaattccggtttccagtatctgtgaatctcaagctttccatcctgccagatcagatagcgtcccggcaacagttttttcagtccacggaaaaatgtattctctccggcaacataggtcagacttaaatacagctgaagcatctcttcattcagttctttcttaaatcccggctgatcgataatatcacggatcatcgttccataaagaagctctccatcttctgtctcatagtaatagaatggttttgttccaaactgatctctcagacagaaaagcttctgctcttcttcatcccataaggcaaatgcaaacattccgtgcatatgatctgccatctcgcatccccatgtctgatatgccttaatcaaaatctcatgttctctttcttctctggaaagtgtaagatcaattccaagtctctcacaaagttcttcccagttacgaatatgtcctctgtatgtttttacaattatcatctgtttaacctctcttttgtcaccatctttggttttgaaagttgtttcttctcccgcttatatcctacagatatcgacaactttcacggttcaattctattctatcacactgactttttcttgtaaattctcaactgtcactctgataccaatctcggtctgaagcatatataacatatgtattttagtcagaatgcatctcaccttcattcgcttcttccatttgcacttcttctgctgcgctacttcctgctatctctgcatcaacatacccaaaacgaatcactgcctgtggccagttaaggctgattcttggtttcttccctttctccacacctgctttttcaatcagatcaagcaattcttccagaactgtttttgtcagataacctccgcgccagtgaaacgtcagaattcttcctttctttgccatctgaagtgctcttttgtaaacttcttccggttttgtaaaagacagtttcctttctttataatagaaatgatctccgtccgtacacttcatagccggagcgatcaaaggctcatgatcccgaaaaatcgatttatcttccagattgaaataatcataacggatttcttctccgatcatacagtttcttgtaagtgtattatcaaatgtcgcatctaaatgataatatttcccattaatccgcacgatattccatgtatgacggtatttgattcccttatccggattattcccgcaaatagcgatcatacaccagactccaagctcgtcacacaacacttttaccgcttttgcaatcccctcacaaactccgacaccctgtcctaacggaccaataatctcatgtgaataaggtttcttcaatttatcatattttacattctcgcaaatgaaatcatgaatatatttttctttctctgattctgataatttctgcgccggtcgtgcaagtttctctactctggatttcattgccttctgatgttctttcaccttcgcccggtcaaacaaatattccggtagaaactgaatgttcggcgattcctgataataacgatacttaaatcccgttgcccagaaaatctccggatgatccaggcgcatctggaaaaatacattatacaattcttccccgctcatgcgcggtacctgaatctccttctccatctgcaagatgccccgacagattgcatgatacgttgcctgctgcatcttattcatcttactataataaaatggttccatacctatcctctccggtcagcagaaaattcttctatctgaacttttcgtttttttcctttcttttcccagatcatcagactgattttgtattggagtgaatctcttgatgcaataaatggttcctcacgaaatatatttatccgaaatccctgttcttctaactctcgtttccgctctgatgctctcttctcaatcttacgattctgactttcttcctcatctgtgaattttcttctcggataatttgctgctgccatcttcagttcttccatcaaaagatctgtgacttctgcatgacgcttttcctgcagcatcccggcaatcttttttgcactcagcttccatggatgtttttgataaaacttgagacatcttaataactttttatcttctactgttgccgcaagctcctgcatcacttgatgtgcttctgctgacggtacccacggattttcccttggaactacatattgctctgaaactgccggataacagcaatgattcagcggcggaaagtccgctagcacagctagtttccgctccgtccgattacagtattttgctcccagataatccagtttatcccgtacgattgcaatcttatattctatctgacgcagatattccgcacctttcacccagaaatgtccgatttctccatagtcatataagtgtacttcttcacttaaatcctcaaaaaaaatcgtaaccacggtctcaccctgatgaactacaaggacataggactcctccggttcttctgttacacttaactccgcttctagttcaccttcataatcctctctatactgacctgtcatccttgcattttcaaagacaagaaagctctctaccgcatcgttcatcaaataaaccagccgcagtttttcttctgtaaaaagcagttcaaactgtccttgttccagcacttctcctagtttcagaaatgcttccggcaattgaatttcactcattttccgctccctcagtacatttgtcttccaagcactcacgaaccttgtcttctttcaaatcctcaccgatcacgatcagaatctcctgtccttctttgattggattaactgtcatcttctgtgttgtcgcattcagctccatccagtcaccggattgattcttcataaatccttttacacggaacactcttccgatatcattaagatttttattgttttctttttcagaatcatctgtgcatccacgtttaccaaacagctttttcacagccggaaccagttcttcttctgtccgattcagattcataaaatataaggtctggaatccatccttttctgtaccttccggtctgcgaaacgactcaatctgatagctgctgttctgaatctgtgcaaaatcttcctctgtcagcatatcccagtcttttgcgatcacttctttttcaattcttctggtacatccaatgcgttcaagagaacgattgacatgtgaaataattctgttttcctgttcttcacaagcattgtccttatccaacctgctcagcacgatcacacccgcatccgccgcctcagatcccagcaaatattccgcctgatctgacagattttcttccagtcccgcatctacgattgtgatcacacttccgatttcgtaccaccgatccagaggttcttctcttaatccatcaaaaaattcatccacgtcatagattcccgacggctccacgattactctgtcatatccacacattgccatagagatcagctttgtcttgaatcgtctgcggtgtgtctctttatcacaccctccggaaatcatttccagttcacatttttctccctgtagctcctgaagaagcatcatatccacattcaccgcaccgaaatcattttccagaattccgatattcagaccctgacgaagcaggtaggatgcatactcttttataaatgttgtctttcctgcccccagaaaacctgtaatcaaatctatctttaccatgattgttcctctcatatctgatatactcgcacaatttactctaactataataccacaatctccttgcatttcaagaattcctcggcattcttgctgcgaggtgcgcgtcatgcaattgcatgacatacttctactgcgcacctctgcaatcctgccggaggctatatcagctgggagatgactcccaccactgatactagcttgtttctcaccacctatagagatgggagtcatctcccagctgatataaatatagagtattgaatccactgcctgttttccctataataaacttatcaacaataaacgttattttttacgagattttcaacattttcatctcatcagaacacattttgtgaagataacgcttacgaaacggagaatttattatggaatttcagaagatcagttccccttccctgagggatctgtttattgaacaattagaacatctgattctttccggcaagctacaggtcggagagaaacttccaccggaacgccagcttgctgaaatgatgcaggtcagccgtgcggttgtcaacagcgggatcagtgagctggagaagaaaggattcctcaccgtaaaaccccgcagtggaacttatgtagcagatttccgcagaaaagggactctggatacattgattgcgatcatgaattacaacggcggacgcatgcgtgatcaggagattcgttccatcttcgaagtccgcattgcgcttgatacacttgctgcacagctcgctatcgacacgatcagcgacaaaaacatccagcgtctcctcgaattcgttaatcagatccgtgatgcacaggatgtcaccactgccattgaagctgcttacgaattccaacacgagtttgccctgatttccggaaatacattgattccacttattttccagtctttccgagcaccgatttttaatatgtgggaacgttattgtgaactctatgggatagaagaattatatcgaagcaattataagacctggacctatatccgcgaccgagacacccaaggagcgattgaatggattcaggaatccatgcaggactgcattgatgggaagcatcagatttactattccaatgagtttgtataaatttgtatttgtctgtctgattctccatattgaagcaaaggatttggtggtgaataaggccgcaaggatgatgctatattgcatcggacaccggcccgctctacctcatccccttgaaagtatgtaacgtaagagccagaacagttaccgtgagtggtgcctgtctggctcttactaacatactgaacaaggtgtattcggaacgctcctgccttacatgtgtcctcaacaatatagcaccatcctcgcttctttattccaaacagaagtgtttgcttaatgggacgaatctgaaagacttcatacaagttttgatttgttgcacgtaaacgagaagatagactcaggttcagtcgatagcgttccttttttacttccgtccggaattctgtatttaagtgttgaattcgttccacggcgatcccttctgtcctggataatgtaagtgatgtggatactttattgttgaggacacattttaaggcaggagcggttctgaatacactttgttctgaatgttagaaaaagcccaaacagaaatcactcacgatgcctgtttgggctttttcgttacattcattcaaagggatgaagaggagcgggccggtgtccgatgcaataaagtatccatatcacgcccttattcaacaaaagtttttgcttcatcactcagaattcaaacatctaaatacaaatttaaacttctgctctcgccattgcttccttataatccttctgatctgtaaagatctcattcttataaggattcttcttctgctgttttgctctcttaataattgcagccagacagatcacattcgctgcaagtgcaattaccgcgatcacaccctgcatggttggattagcacttgtcggtcttactgctgcatccatgaatccgtcagaatacagagctggaattactgagaaacggcttgcatcctggaataatgggaatacctgagcaaacatacaccacagtgccagtgtattcgcgcggttctggatccagccacccttgttccagaacatatttgcaaatgtcggagcaagaagtaatgcaacaccacagtagaatgcatgtgttgtcaggttattgtatgtgtactcaaaattccacagatcatatgcaataatgaagcaccatgtcatatccggccaaagcatatcatcatgtttcttggatgtgtagattccccaccatcctgtcatacagaagatattcaggattccggcaattccgttcacccagttccaccatcctccgtagagccatacattttctgaagacagccaccagcggtcaccgaattctttcattgccatgaatccacggatacctgattcaaaatcacttactactgcaatcagaatattgattgcaacgattgcaaacgggaatactttgaaccattctgtcttaccaattccccatttgtatttcagcatcataaaaccaatacaccctgctgttgcagcatacaattttgcataatggaaccagcttgtcatatgtacataagtatcgttattcagtgcccattctgcaccatttgctgcacagatatagattgcgatgaaatacactgtaagtatagccggaatagctccaaaacagattagtccaccgatttttgtacgtcttgcgaattcatttgcaagaacaagtccggcaaacaccagtacccaccctaacagctgccagccggcaccatcgccataaatttggaataacataattatccccctccttcttttaattggttataccaacctattgttatctttttaacattatactcttcttattattatgcgtcaataaatgcacctgtttctcctatttttcagcactttataataaaatatctctccatatttttgtatttttacaatagatttgcactttggcatctggtatgaccacagccacatcattttctttctgacgattcagaaaattcatttaagcattcttatttttgagttatctaacaattcaatattcattttattctgttttatgcgtacttttcttgatttttttcatgtttttgcaagaatacatatatatttcttgcaaattctatctcaactgtttataattacattaacatgcattatcaagacactagaaaacgtatatgtattgtgaggacgaaaactatgaattcaaatgatatattaattgcaaacactgacgatctgcgcagtgaaatggactatttagagaaaactcttttgaaaggacaccgcatcgacccgaatctttatgaagaatatgatgtaaagcgcggacttcgtgattcgactggacgaggagttcttaccggactgactgaagtatccgatgtctgtggtttcgatgttataaatggacgtaagattcctgccgaaggtggactttactatcagggaatcaacgtaaaagatcttgtaaacggtttacagggcaaacgatttggatttgaggagacaactttccttctactctttggacgtcttccaaaagaagatgaactggaacatttcctgaacgttttatttgaacttgaagatttaaccggacgttttgttcgtgacgttgtcatgaaagcctcaagccctaacatcatgaactcacttcagcgctgtgttcttactttatatacatatgatgagaacccggaagacatttccgtagagaatgcactgcgccagtctcttgaactgattgcaaagcttcctctgatcgcagtatattcttatcatgcatacagacatttccgtaaagatgagactcttctgatccgtaatccagagaaaggccgttctcttgcagagaatattctgtatatgcttcgtccagacggacaatatacagaactcgaggctaaagtacttgatgttgcactgattcttcatgcagagcatggtggtggtaacaactctactttcactactcacgttgttacttcttcaggaacagatacttattctgcaattgctgcttccatcggttctctgaaaggacctcgtcatggtggtgcaaacctgaaagcgcaggggatgtttgatgatattaagaagtctgtcaaagactggactaacgaagatgagattcgtgagtatctccgcctgattcttgataaaaaagcctttgataagacgggactgatctatggaatgggacacgcagtctacacaatctccgacccaagagaaaagattttgaagagctatgcacagaagcttgcttctgaaaagggatttgacgatgaattcgcactttatgaccgcgtagaaagaatcgccggtgaagagatcatgacacacagaaagatgctgaaacctgtctgtgctaacgttgacttctacagcggatttgtttatacaatgctgaatattccggaagagcttttcacaccactcttcgcgattgcgcgtatcaccgggtggagtgcacatcgtctggaagaactgttaaatgccggtaagatcatccgtccggcatacaaatatgttgggcagcatacagaattccataaccgtgatgacagaaattaattatttgatacctgattattattctaagttcacctgcatcgccgaccgctgtccgatcacctgctgccaggaatggaagattggcgtcgatgcagatacgaaccgtaaatggaagaaactccaggctccggaaaccgtacctgaacaaaagaaaaatttaagcgcttatacgattaaaaaagatggacagcgtgtgataggcctggacagtgatcatcgctgtccattccttaactctgagaagctctgccgccttgttgttgcttacggcgacaaagtcctatcagaaacatgcactacatttccacgagaggaacatcgctttccgacacataacgagaaaatgctgatgccttgctgccctgcagtgattgacctgtggaacaaacagaagtccctgcattttccaaatgtatcagacactttgtccgatactggcgatacagatacttctgtccttttcctcttgcgtgaaaaactactcaatcttttagatgattcttccagaacaatcgaagaagaacttttggaaagcttctatattcttcaggaattgtaccagcatcagccattaacaaaagaactgttagaagattatttttctgataacacagtaagagaacttggaaatgcgatctcagatatagaccttccacctttggatctgatcagtgaatgtaacgaactgttacaagatctttccgtaaactatcaaaaagaaggactctatcaggatactctgaatccaattcttgctttggcggaagaaatatcagaaaccctttcggacagtactgaaaatcctgatgatactaaagcttacgaatccactttactggaacaatgggaacaattcacacaatacttgagcccttacgaaccactgcttcgcaatttcctgcgcaacgagattttctccgatctcctgcttcctgacagtgacctggaaaatgtactggtacagatgcaatggattgcccttgaatatgcatcaatccgccacagcattttcttaagatggatgctagatggcacagacgcaaacgtttctgaaatttcttacgaaacgttgagacaatatcttgtgatccttacacgaatgaccggatatgaaacagcggatatttatgaatatctggaaaacagtttcgaatccctcttatgggactggggctactttgcattaatcatcggaaaatagaatagaaaacggatggtgtagcaaggcaaggctttcttgtcttttatatcatccgtctttttgttttgaaaatatttccgactatctcatacaaatgtacacaacatacactgcataaaggagcaacatgataataccttcttttctattaagttctcttttcgtccacgccatgatccatccaataacactgaacacgatcagcactgcaatatcaatgatattttctgtcaaaaatgcgaccggtgaaattgctgccgcaataccaagcaccatgagaatattaaagatattggaaccgattacatttccaagtgccatatccacctcacctttttttgctgctacaatcgatgtaaccagctccggaaggcttgttccaaatgcaactacagtaagaccgatcagagtctgactgattccaattgccgccgcaactgtacaggcaccgtctactacccagtcacttccgaccgcaatcgctactgcgccgagaataatgtaaatcacactctttcccatagacatttcctgaatctcctccgcttccagaagatactcttcctcttccactcccggctccacatttttctcacgagatgtttgtgctgagcggatcatgtagaggataaacgccaggaataagataatgaatacaactccatctatatgtcccagtgacattccggctgcaccaagaatcagaagcaatatcgcacacagaatagagattgggaaatcaatctttaacgtattaatctgaactgccacggaagtaaaaagcgtacaggctccgactacaaccatgagattgaaaatattagatcctaccgcattactgactgcaagtgcattgtttcccgtaactgctgccgtcacactgaccgcagtctccggaaggctcgtccccatcgccacaatcgtcattccgatgatcagtgacggaacatgataccgtcttgcgatactgctacacccctcaacaaatgcatctgcaccttttacaagaaacacaaatccaataattaaaagtaccactgcaaatggcacactttgaaacaaatcactcatcttttatttcctttcttttatgtcatatctgatcaattttatgctaatccagacagatgctgaatcaatattcttatccctaaaagcaccaggatgattccaccaaccagttctgccttatgtttatatttcccaccgaaataatttccaatcactacaccagcaatagaaataatcattgtcgtaattccgatgatcgtaattgcctcaagaatcggtgtgtccaaaaatgcaaatgtaatcccaactgccagcgcatcgatactcgtcgcaacggcaagtacaaacatatttctatgatccaacggctgatcttttacttcaacaatatcttcttcgttccattcttttactgcctccagaatcattttcccaccgataaagctaagcagaataaatgcgatccagtgatcaatacttgtaatatacttttggaactgaattccaagaatccatcccacaagcggcattaatgcctggaaccctccaaaatacaatccgatcaccaccgcctgttttttattcagcttcttcattccaaggcccttacagacggacactgcgaatgcatccatcgcaagcccgacccccatcaacaaaagctcgataaatagtgccatgtttctcctcttttcttttttcttctgtatctgttccgctacaattgcagtacgcatcctgagcggagcgttttttatatattagaaaagaactttcctaatatataaaaacaaagagacccacgtatgttctatgataagagaactgcctgcttgacataacaaactcgtcctcttatttaaaacatacatgagtctcattctttaagatttgccaggtgatcttttaaaactcattctcaccggtatgttgacaaatcacattttcatgcgaactactccctcacggaatatattcaattcatctttcggctcggttcgtctcatgaacaaccaccttattgatacatcgttttttactataacgaatgaattctgttttgtcaataaattttatcatttattccgagacatttcgttactgtgttactgttcacagtaacagctttccccattagaaaagcaatattccgattcctcttgtgatgatcgcaacaatccatgcgatcaagcactgccagaacaccattccgacagcccattttgcaccaagctcgcgctttacggatgcaactgctgcaacacatggtgtgtagagcagactgaatacaagcaggacaccggctgacagaggagtcagtacagaagcaattcctccaccaaacaatacctcaagtgttgatactacactttctttcgccataaatccactgatcagtgctgtacagattctccagtctcccagtccaagcggacgaaggattggaacaagtgcacctgcaatcatagcaagaatactatctgctgaattctccacaaggttcagatgcaagtcaaaactctgcaagaaccatacaacaatcgttgccattagaattactgtaaatgctttctgtaaaaaatctttcgctttctcccaaagaagctgtgccacattcttcgcacccggcagacgataattcggaagttccataacaaatggtaccggttctcctttaaacagagttcctcgataaaggaatgcgattaaaattccaactacaattccaagcacgtacagacctgacataatcagtccaccgttacccgggaaaaatgtacttacaaagaatgcataaatcggaagtttcgcagtacagctcataaacggtgtcagaaggatcgtcatcttacggtctctttcactggtcaatgttcttgttgccataactgccggaaccgtacatccgaatccaatcaacatcggcacaatgcttcgaccggaaagaccgatcttacgaagcattttatccattacaaatgccacacgcgcgatatatccactgtcttccatcatagataggaagaagaacaaagtaacgataatcggaagaaaactaagcacgcttcctactcctgtaaagattccgtcgattacaagacttcggattgcatcatttacattgagtgcgagcagtcccgcctcagccattcttgacaactgatcaattcccatttccagaattccttgcagaaatgcaccgattacattaaatgtcagataaaatacaagcaccataattccaataaagcatgggatcgctgtatattttcctgtcaagattttgtctatcttctcacttctgacacgctctttactctctttcggtttcacaaccgtctgctcacagagacgctcgataaaatcgaatcgcatatctgcgattgccgcacttcggtcaacctcacgttccgtctccatctgctgtacaatatgttcaagcatatcaagttcattctgatcaagctttaactgttctaagatcagcggatccccctcgattgccttcgttgcggcaaaacgtaccggaagctttgcttcttctgcatggtcttcaatcagatgaatcactgcatggatacatctgtggaccgcaccgtcatgatcacttttatcacagaaatcctgacgcagcggacgctcctggtattttgccacatgaagtgcatgacgtattacttcatccacaccttcgttcttcgctgccgaaatcggaataaccggaactccaagcagtgcttccattgtattcacatcgatagatccatgatttccaatcacctcgtccatcatattcaaagctactaccatcgggatatccatttcaagaagttgcattgtcagatagagatttcgctcaatattcgttgcatccacaatattgatgattgctttcggatgttcattcaacacaaaatttcttgaaacaatctcctcactgctgtatggagacattgaataaattcccggaaggtctgtcacattcgtattcggataacctttgattgttccatccttacggtctactgttactcctgggaagtttcctacatgctgatttgctcctgtgagctgattaaacaacgttgtctttccacagttctgatttcctaccagggcataagtaagcactgttccatccggtaacggattcgcatcttcttcagaatgatactttccttcttctccaagtcccggatgatctaccggtttcaaacgttctccacggaaatggctgtttgttctctcgctgatttcctcaacttcaatctgttctgcctctgcaagacgaagtgtcagttcatatccatgtacctgcaattccatcgggtctcccatcggtgcaaactttaccaccgtaacttccgcacccggaatcatacccatatccaaaaaatgctgtcgtaacgcaccggaagctccaactgtcctgatcacagcactctttccaatcgctaattcttttaatgtcatttttttatcatcctctttagcttattgcgattttttatcaattagttatacaaaactagcttattccaggatgttggatttgtcaataattatcatttacaaaatgctgtaataaaaaaagaaatgctttattccctcttatattttgggaaataaagcatttcttttttcattatatagcagcctctcgttttttcagtggcgcataaacgattcttctgacaaaaataaagcaaatcacctgcaggatgatcgtaatgatccaggataccggataggaaataaacaaaatcttcaatgatctgaatcttggaaatattccaaagatccagacgattctcgttccgactgttccgattacggaaagtatcatcggcacaattgattttcccattccacgaagagatcccgggaacagatccatccatccgcacagaaaataagtaactgttgtatatagaagaatctccataccacagctgataacctgaggatcatcggtataaatcttcaaaagttccggtccaaagagatacgcacctccaccaagaattaatgcaatcgttgtggaaagaatcaggcagtcaactaagactctgtccattcgtttccattttccgactccgtaattctggcttgtaaaactcatacatgcctgtgtcactgcattgatcgatgcatataaaaatccaaaaatgttattcgctgccgtatatcctgccatcgccacggatccgaaagaattgaccgatgactgcagaagtacatttgagaaattgatcacagtactctgaattcctgccggaattccaacctgaaagatctgtcctaaatatactttttttatcattagcttcgagaagcgaagctgataactgctgtctgatttatacaggcaacgcaataccaatacacacgatacaaactgtgctgttaccgttgcaattgcaacgcccgctactcctaaatgaaaagcaattacaagtaaaagatttaaacatgcgttaatcacacctgctacgatcaaaaacaaaagtggtcgtttcgtatctccaaccgctcttaagattgccgctccgtaattatataacataaaaaacggcattccaaggaaatagatcttcatatatagtgtcgaaagattgatcacattatccggtgttcccatcaactcaagtgctcctctggaaaagaacaatccaactaatgccatcacaactccgcttataatcgcaaatgtaatcgccgtgtgcaccgtctccgacatctctttctcgcgccctgccgcatagaacctggctgcaagcacatttgctccaagagatattcctataaataagttcgtaaatacattgatcagtgctgtggttgatccgactgctgccagcgactcacttccactgaatcttcctaccacaacaatatccactgcgttaaatgcaagctgcagaattccagatatcatcagcggaattgaaaaagaaatcagcttattcatgatcgagccattgcacatatcaatttcaaatctgtttttcttcttttctgaatgcataacttttcctcattccataaattattgtaactgttcaaacactctcttaatgctgtcataatgaaggaagattccctccttggcaaagttttcaatctcctccttagttgcgaacatatatccatctgtttcttctgtctgaagtttcagatcattctcatcaatatcaagcacaaagcgatatacatcaacaaaataattatcaccctcgcccggattttctcgcttataagtaaatagatatccgccttctgcattagaaatatctaatcctgtctcttctctcacttcacggcatactgcttcctcagaagactctcctgcctgcgctgcaccgccggatacttcccaccaacccggtgcccacgcttttgtcattacacgtttcgtgatcagatatgttccatccggtcttgccacaactccaagcactgtcagatggtattccccatcctttaagcaccagtcatttcgcttcatcgttcttccggtcagccgtttctccgcatcataaatatcccaatactccatgatattttctcctcgtcttatctatctcacgtttttcatttttctttcttatcatacatttttagaaaaaagctgtaaagtctttggcaaatattttccattagactttacagctttcactatcattcgttattcacttctatctcagataatatgtcatttcatgccattcttctccaccccagacagaatctgacattcccagatccacaaacccaaatcttttatacatctctactttttcatccaggcaggtaagaacaatttcttttcttcccttttcttcttctctttgcagataacatcttacaatctctcgtgccagaccttgtcctcgatactccggtaatacatctaatccgaggatcataactttctttccttttggattattcaaagatgcatctgtaaaaaattcatctcggaatttttcctcgtccgttgcaattccattcaaaaatcctgctaacttcccggttgttttatctactgcaactaaaaacaattctggagtcacaccaattcgctccttcatgtgtttctcagaacatgcttcatttggcgggaaacaaattttctcaatcaagactgcctgatctgcctcttcctgtctaatatccctgaattcaaatctttctaaaattctactgttcacttcaatctgtccttgcattttctaatctccttctccatcaacttttgtaataatatgtttgtaatttcacactgtcaccgtaagcactgctcctacagatgctaccaacgacgctgctactgctaatatctgaaacggcaggcttccaagccttccacagatcaggctggttcccgcacgttttctggaacgattgtatgcaacaatcactcctactcctgtcagaacctggaccacacttgccattcttgtaaatcctacaaagctctgcactcccacaagtgcgatcacaagacaaggtaatgtagctacaagccagctgatcttttctccccatttcgtctgttcattcacaatatctcgaagattcagtgtattcgcccagaaagatgttgcaagagccagcaaggaaaatacatatccgataatgctgacccatccgccaagatgaccggaaagatccaccagtgctccattctctgtcacattagaacatcccagaagcgtcataaatgtgatcaaaagaatcagtcccatattcaagcccgtgcctgctgcaatcgctttacgaatacctttttcgtctccttctaaacctttcacaacctgtggcacagacataacagcagataatgaaaatgcaatcatgctataaagtgccagcatattgttattcgaatagaactttgtcgaaagctctgttgtctctgaaagcatcgttgctacaaaaaggatccctatgactccaaacatggaaatcactgcaattttctcacaaattccaaccagtttcattccgatatagaccacacttgctgccaatacataaaagagcagcattccgaccactgacggaaggtaaaaccatgcagaaaatacagctgccgcaccggtaataaatccactcacattcactacaaccgaaaagccaagcagcccaaacgccagccatgtacatgccatcttcagctttcccacaaacagctcattttcaaagcatttgataaactgtgcgccattgttattcaaagacagttccgcaatcataaaatgcaatagcagattcatacaatatgctactgccgcaatccagataatatcatgccagttatttctggatgcaaggaatggaaccgaaagaattcccgatcccacgccgtgtcctatgataatactcgtcgactctaaaaaagtcagcttcgattccccatgtactttcgccatacctacgcctctccgtccgttcgttactgttcacacgatgtgcgaccagcaacgcatctcgccattttaaatcgcctttggcgatggggcgagatgcattcaagtcaaaacacgcatcctccgtgtcaatcagcggagtgattgacacgggagtgaacagtaacgttctttcttcttgtcttataagtatagcatattcttttcatttcttgaagttgataaaactacaatctgtcatcttatatccgtcatttcacatcatcatccacatcaattatattcccgttcaacgcatccacagcttcctgtatctgtcctgcacattccttacttattttctggattcgatacaagatcacgctgttgatcactgcattggttatgaaaataattcccgtcatgatcgcagctgcctttactgtatccggtgagaagaacatcataatgattcctcccaaaaccacaagtgctgacagaatgacatatcctacactgctcatatgaaacagccgtctcatatagactgttgtttctaagcagataataccattgattatgatataaatactgaacacataagagaacagaaccgtcataatccctgcatgagtaaatataaagattccaaggatacatttcataattccctcaaacagagttcctctcgagtataagtcaatccatgctctcttatagtaaaccaggtcatagataccatttacaaatattatcacacccgcgataatcgctgttatttctagagaatcctgcggacggacgacaaataaaacaccgatcagaaacatcataactacactgatccacatatcagtctttatttttttcaacatcttcatactcttccctcccgatcattttctcgtttttttacttttctcaactgttattcatttctcttttccgccattccaaagcttgtctgctgctggctgccagtctttcgcgtactgatcgcattttgcacaaagatgctcgactgtttccggagactgaaggtctgtagaatgtgctccggcttttgctaccatctcgcgaagtttttccgggttttctagcatcggacatgggcgaagcatattgtcattaaatggctgattgtcgtgataagccatcatcattggtgaacgcaacgtatccagtaatgatttttctctgatattggaatctgaataatgaataaatacacatggatcaatatctccgtttgcattaatatgtaaatatcgatgtcctcctgaaacacatccacctacatactccgcatcattttggaagtccattgcaaacaacggttttgttgcacgataattacggatcttgttataaactccgatacgctgttccggcgttggcatcagttccggtaccgcatcatttccaaccggcatatagtgaaaataccatacaaagtacgctcccatttcaatcatagaatcgtagaattcctctgatgtgatagaatcatagtttgcacttgtgtaacaacaggagataccataaatcaacttcttgcttctaagaagttccattgctttgcgaaccttctgataaacgccttcaccgcggcgtccgtccgttgcttcctcaaaaccttccagtgaaattgccggaacaaagttgcctacgcgaagcatttcatctgcaaactcctcatcaatcagtgttgcattcgtaaagcaaaggaatacacagtctgaatgcttttcacaaaggcggattaaatctcttttacgaaccagcggttctccgcctgtataaatgtataaataaacgcccagttttttcccctgacagataatatcatcaatctcgtcataggtaagattcagtttatgaccatattctgctgcccaacatccggtgcaatgaagattacaggctgacgtaggatccagaagaatcgcccacggaatattacaattatatttctttcttaattcctcttcttttttccatcctaccaaagctgaattgataaaaaagttaacagccagtgtctttgttactttcggatccacatcattgatcagatgacggataaagttataatatggatgttttggatctgtgatcgcttctcggatcatctctctttgtgtcgggaactctccttctgcgaatttatccgcccagtccataatcttcggcatgtttttatccggatctttataaatataatcaaatgttttctcgattcccagtttctttaaagtatttgctgcattcattgtagtgtcctccggttttcattctttcatttgccaatatatagatatggctattattagctctaatctagctcaattctagtattccaacaatggacaaaccacccacagatatacaaaaaccagacattcgacaacaaattgtctaatgtctggtcttaatgtttaacgtctttatttcatttaaagattgttttctaatgtcattttgaaaatcagtgatcagtggaagaatcttctgcacatttaagaagagctttctcaccggatccggcaaacagatcacacacttcctgacaaaatcccaccagatcgtaggaggcatcatcctccagccaatcaagaataatccccgtaaatgtacatttataataccgtaccaggctttccgctttcgtctctgtaagtggcagattacctgtcctgttttccacataggaacagatgatatggtatcccattttattcagatattctaaaaaatattctttctttgcagagcggtaaagatgtaaaagagctttttttctcttcgtacattcttctgccatatagataatgcaatgtgtcagagaatcaaaatccccacggtctttgatcacctcatctgtccacatttcgacagaccactctgtaagaaacggaatatcctgaaaatgataataaaatgtattccggttcacgtgacatcgatctacgatatcctgcacagtgatcttattatatggtttttcctccaacagctgccagaaggtatctacaattgcaagttttgttctgttcatctcaatctccctgtttttccatatccatattatacaggaaaaccttactgctcacaatagttatgaatattccattatttttctaaaagatgtcacatgtccttgacgcaaccaaaatagaaagttacaatagccttatcattcgatttgttttttaaaacaatacgattaaatcaggaggaaaatgaacatgaaaaaaagaaatgtagcacttgtattagcagcaacaatgatgttgtccctggccggatgcgcaggaagtagtgaaaaagtcgaagacacaaaaaaagcacagacagaaacagagaacaaaacagaagagaaagaagatgctgtgcagattgacggagctctttctatctactgtggtgctggaatgcagcagccattccaggaaattgcagacgctttccaggaagagacaggctgtgagatgaacgtaacatatgccaatgcagcacagatccagacacagattcaggaatcccaggaaggagatttctttatcgccggatccaaagaagaattaaaacctgtagaggaattcgtaacaagtagtgaagaccttgtaaaacacattcctgtattagtcgtaaaagaaggaaacgagaaaaatatccagggattaaatgaccttgcacgcgaagacgtagtcacagtcatcggagatccagagtcaacaccaatcggtaaaattgccaaaaaagcatttgaggatttccagattggagaaaaagtgacaatcgcagcaacaactacaactgctccgcagcttgcaactgtagtcggattaggtgaagctgatgcggccattatctggaaagaaaatgcaaaagctgacggcgtagaaatctgcaacactacagatttagataactatgtaaaggtaattcctgctgcccgcttatctttcaatgaaaatgcagatgcagcagatgcattttcagaattcttagaaacagaagcagctcataagatctgggaatcctatggctatgaacttgtaaaatgaaaaaacataaaatagatttatttacatttttttgctatctaatcacgcttttcgtcatctgttttataggcggaatcgtatgtattatcatcttccgtggtggctatgtgtttgcagaacatttaaaagatcgtgaaacactctttgccacctggatgagcgtgaaaacggcactgatttcttccatcctgtgcttttttgtagcaattcctaccggatatgtgttgactcaccttcccgttccgtttcgcggaggcgtggaagctgtcttggaacttacaatgacacttccatatatcgtcatcggactcagcttactgatcttgttttcgacacctgccggaaaagcactcaaatccgccggacttccatttgtctttcatcaaaatggaattgtaatggcacagttggctgtgaatctgccttttgcgatcaagctggccgtaatggcctttcaaggtgtgaaccgcaaactagaagccgttgccggtttgctgggtgcttccagatttcagcaatttcgtacgattatattgccgttatgtaagaatacactgatcagttcctttattttaatctggtcacgtgcactcggcgaattcggagcaactctgatgctggttggcgtgacacgaatgaagacagaaaccctgccgggaaacatttacttaaacgtcagtacgaatcagattgatggagcgttggcaagtgcttttctactcttaatccttgcagcattctccttatttatttctcatctggtgacaagaacagattggaggaaacagcgttatgaatgaaacgattgatataaatccgaaaaagcaattactgaccgtccaaaacctgaatctgacaaggggaacctttcagttggaagatatttccttctctgtctattcaaatgaaatccttgcgatcatcggaaaaaccggttccggaaaaacacttttactggaaagtattgcaggatttcagaaactggattctggtaagattctgctgcgggaacattctttagaagactattctttacaagaacgcaaacttggatatttatatcaggaatactgtctcttcccacatatgaccgcaagggaaaacattgcttatggattgaaaatgcaaaaacgtccaaaaaaggaaattaccaaacgtgtagaagcactcgctgaagaattggagatcacttctattctaaaccaataccctgatacattaagtggcggcgaacaacaacgggtcgcattagcaagagcactcagcattgagcctgaacttttattgcttgacgaaccattttcttctctggacccggtcacaaagaaaaaactttatggattgatcaaggaaatcaatacacagcacacctgtacaattgtatttgtgacccatgatttttatgaagcgcagaatcttgcagaccgtacaggggttctgatcaatggatgtttgcgaggaattgtagatagtgataaactgtttacatcaaactgggacgaagacgttaatcattttttaggaaagagagaacatcatgacaaaaaaagaattgtatgatattttaaaagaacgatttcaggaagttttaaaagaacatcagattgagaacgaccatctgtctgtttcctgccgttccttgactccggaagaagcgattggaaaaacaaaacggaccgattatccaatccttaccggaaaagatgtgatgattcaggcagaatacaaaggattccgcggacaggcatttaccgatgccccatccgcctttgaaggaatgctcgaagatattttacaaatggatattgaacacgatccgcatgatcggggaatttttattgcaactgtaaatgctgttatggcgtcccttggcttatgctgtggaactgttcattgccgtacagaaggacctgaactttgtgcacaggatatgctgaactatttagaaagcaattacccggatgtcaaacggattgctctggtcggatttcagccttctctgttagaaatgctttcaaagagcaaatacgatgtccgtgtaatggatctgaatccaaacaacatcagacaggtgaagtttggaatctgtgttgaagacggaactactatgaaagaagaaatccgcgactcctatgcagaattaattctttgcaccggaagtacactttgtaatggatcgatcatcgattatttagatcttgataaggatgtactattctttggaacaactgcttccggagccgcgccactgttaggattaaaacgcgtctgctttgcagataaatatgaataaatcttttcatatctttttaagataatccgccctctgtcgattgacagggggtggattatattctcccagaactatacagttgatcatgttttatgttatacttttgttagaaatatcacttgatttttaagaaagcagaggtaactatcatggaattcaaaagcattttaataaaagatacaaccgtagaggaaagaaaacagatcgtaaaagaatctttaggcaacatttctgcaagctgcgatggttgcatggcaagactttcagaaatgtacgatgagtatatcgaaggtaaaaaagagatccgtgacattaatatggaatttaatgggcactatttacgcggagacatggacaaaggagaaaaaagaagctgtccaatgtgaatcaatgttcctttatatgttcactcaaagcctatcaacagaatggaggtgtttgtatgaaattcaaaaagagaattgcatttttcttagcactaatgttggctctgctgactgtcggatgcggaagcaaatcaatgtcgacatctgaggacagcgcaaccatggaatctgtctacggtacagattattcagaaaacaaatactgcggagaacctgcggaaacagccgatgcaggaatcacttcaggaaatggattggaagctcaggtagaaagcggacgcaaactgattcgaactgtttctctttctttgcagacaaaagaatttgattctgtactcaataatttgaaaacaaaaacaaatgaactaggtggctatgtcgagaattcttctatcagcggcaacagttattcttacacgacaacccgatatgcaagctacaccatacgaattccggcagacaagttaaatgagtttgtggatatcgttggtgaacttggaaatgtaacacaggaaaatgaatccgtggaagatgtgacacttcaatatgtagatgtcgaaagtcataaaaaagctttagaaacggaacaggcacgtttgatggagctgctttctacagcagaaaatatggaagacctcttagccattgaaagtaaattatccgatatccgatatgaaatagaaagctacgaaagtcaacttagacttctggacaatcagattgattacagcacagtgcatgtggagatatttgaagtcgaacgtatgacagacgcgggtgagaaaggcttctttaaagaaatcaaagaacgattcggagacaacctgtataaagtaggtcacggtttcaggaatctcatcattggaattcttggtgcattaccgatccttattgtatgtgcagcagtcatagctgttatcgtagttatagttaagaaaagcatcaaaaaaataacattcaaaaaacagaaaaaagcaaaagaaaacgatcatgaagaaaacttcaaatagcgactctccttcgtttctcttgtaaagcaaagcactcaaaagcggaaaacctctgaatctaatgagattttccgctttttgttttcctcttattctctattcttttttatatttttttccattgcagcaatttcctctgccgtatattcttccaccactgtctttgtcacttgttttatatttttttccttcagacgaagatatacaaattccctgaaaatagtgtacagaaccgaaactaatggaatgaaaataagcattcctacgattcccataagattaccaccgatcgtaacagcagcaagtacccagattgacggaagtccaaccgatccaccaaccacatgcggataaatcagattgccttcaatctgctgaagaatcaaaaatacaataataaataaaattgcttgcttaggacttaccataaaaatcaaaaagcagcccactgcacatccgataaaagctccaaagatcggaatcaatgcagtaaaagcaattaaagttccgatcaaaagtgcatatggcatttttaaaatactgagtgtaacgacaaacatacttccgagaatcacagcttctacacactgccctgtaaggaaatttgcaaatgtccgataggtcagagaacaaattttcaggaatgcctcagctttttgtttcggaataaatgcgaaaaatacttttcttatctgtacatacagtttttctttctgaaaaaggatgtagcatgcaaaagaaaacgcaatgaaaaatgtcgcaaatccactgacaatagagcccactgccgacattgtcgtattcatcatatttcctgctccgctgccaaggatactgattccccatttaattgcctgatccggattaaactgtacttgatttactaatttcataatatcttgattattatgtgaaaactctcgaatccagtcttgcatctgtggaataaaattagcaatacttatcatcagacttgctattgtccgggtaagctgtggaatcacaccaaacattactaatacaactacaccgacagctaaaatgattgtaagaagcaaacttaccggcctggcgagcttttttcctgccttattctcttcttttgccttgccaaaaatcttcttttccaaaaaactcattggcacattgatcacgaaagcgattgccccgccaagtacgaagggaaatagaattccccctatcgttttcagtacatcgatcactacttcaaacttccacaatgcaactacaagcagcactgtaaaaataatcaattctcgaatttttttcatagataacttatttaaatccattatccttctcctaatttcttaaaatcagccagctatacttttatgcaacaagatatttttcatcatatgttaaaataatattgatgtcaagacgctttatcaattcagcttggcattgtatcattcttgtgataatgttatttatgaacgttatacaacgaataactatcagatattgaaaatgaaacctgaaaaaatcgaaataacgaaatttatgcgaaaagagaaataagaaaatggcacaaaaacaaaacaaattaactcaaactgctattgtagcacttcttgcttgtgtatgctgtatcctgtggggaagtgcaatcccggtaattaagacagggtatcaccttctgcaggtagattcttcagacactgcaagccagattgtatttgccggaatccgctttactttagctgggattctggtattaatttttgcatcaatcaaggaaaagaaagtgatgcttcctgataggacactcctcaaatatgccattcctgtgtgtcttgcccaaacagtggggcaatacttctttttttacataggagttgcacacacttccggagtaaaaggtggaatcatcaccgggcttggaaattttattgcaattttgttgtcttgtctggtatttcgaaatgaacggatgacgagccaaaaaatcgcaggatgtgtattgggatttgcaggcgttgtagtaatcaatctgatgggaaattccctggatataggatttaaactgatcggagaaggatttattctgattgcacaattatcttatggaatgtctactgtgttgatcaatcttttttccaaaaaagtatcaccggtagtgttaagcggaacccagttcacgatgggcggaattgttctgactttaattggaattggaatggacggacacctgggaaatgtaacggccggaggtctggcaattatattttaccttgcgatggtttcagcagtggcatatacgctctggtctatactgcttgcatggaatgatgtttccaaggttgcgattttcggattcgtaaatccactttgcagcgtaatcttatcggcactgatactcggagaggtaaaacaggcatttaatgtagggagtctggtggcgttagttttagtatgcgcagggatttatattgttaatcataaaaaaaactaacatgagaaggatgtcagccaatcaaaaatactttaatcagaaaattttattacaaaatatatattattagaaaggaactactctcatgacaaagcgacttatagacacaacagctactgaattatcttcttatagcaaatcagatttattaacttctattgcagatagtgaaggaagaacacttgctgcagaaacaatcggaacagtaacaccgatgttagtgaacattacaaatgcagaatttgtaacctcacttggagcagacttgatcatgttaaatattttcgatgtcaatcagcctgtaatccagggattgccacatgtatcaccagaagatactattcgtgaagtaaaacgtcttaccggaagaatggttgcgataaatctagaaccggctacaattaaaaacaatgacgaggagtctgtctggaatctgacaacaggtcgccaggcaaccgttgataatgcaagaaaagctgccgatatgggagtagacatgattgttctgacaggcaatcctggagtaggggtagacaatgaagcaatcatgcaggcactttcaaagctaaaagatgctgttggtgaccgagtcatccttacagccgggaaaatgcatgcatctggaatcatttcagaagcaggcgaaaaaattcttactgaaaaagatattgtagattttatcgatgctggcgccgacgtgatattacttccggcacctggaacagttcctgggatcacaatggaatatgccggtaaattaattaaaaaggcgcatgagaaaggtgctctggcaatgacaacgattggaacatctcaggaaggtgcagatgaagataccattcgtcagattgctcttatgtgtaaaatggccggtgcggatattcatcatattggagacagcggatatatgggcatggcattacctgagaatatcacagcctatagcgtggcaattcgtggaaaacgccatacgtaccgaagaatggcaatgtcccttcttcgctaacggagagtagaaatactctccttatttttgaataatcccctgataacctgctttaaggaagagatcaaagcaaccctggaatctgcaccattcctcatcagactctcccagatgctttctgcacatccccaaacatcccataatttgaactgtcaataaatctgttaatgaagcttcatccaattccgtcttgccactcattaaatcaagaaaatcttgccttagtgccgcaacagtatgctttacagcttgaagaaacaacgcttctgagaaaaaaagcggctgatattttggattctttcgaagaacccaacaaagccccttctttgaatttgatgcattttctgatagcaacgccatatttttaatatcacataatgcatctgaaaacaattcatcaaccacctgccctatgttaccaaaatgagcataaaatgttcctctgctaacacctgcatatttgcaaagatccgttatagtgatttgcatataatcctttttcataaggagttgcaggaatgcatctttaatagaattatgtataaaattgtcttgaaataaaattgttttttcttctttcatatattttaaaaagctccgcaatatatatgtaattatagtataaattgacataaaaataaagtatttttccagattttaggttattttaaacaatctgattagctttgttcaaacacatctgaaagagattggtttatcgatttgtttatgttatgttggatatataagaagcgtgtatataaaaatagaaggaggtaggtattctatgggagaaacattatacacaataggaacggatcagcagcaggcatggatgaaaaaaaactgttttccacctagaggatacggttactctgaaccgggaacatattctcttgatgctacagaagttgcagcatacaatgtcgcgaagtcattttatcaagtctatcctgaagtctggaatatcgattatattgcaaaggaaaccggaatcaaaccagatgatatcaaggatcgattaaaacgaatgtatgatgaacatcttatcatgttcgttatgaatccaaatgttggtgtttacggttggggactttattattgggttgtcaaattaaaagacggtacagatccaaaggtaaaagctgaatttgccaagtggtatcagaataaagatgatatttgtacaggatatctcgcagagggcgatttcgatttctttaacggaaatcacatgagagttctggacaatcttcttgcagatgttatccagccatggaaagacagaccggaggttgaatatgtacatctttgtccgatcagggcagatgtcagagaatcacttgtaaatcaatgggatgttccggaagacagatacagaaaatttatttttggggaagaacagaagaagaaattccttaaagttcagaacaaaatagataaaaaagattttgctattatcgaagctcttaacagtacaaagtctatcgcagatatgtttgattttgacatgctggagaaattatccggcttagatggcaagcaaatgaaaaaagacattgtaatgtgtgttgatgaacgaaaatttatgcttccaatgatttatattaattaccgagcactcggaatgtcaatgcatatgtacttggttcgtatgttccaaaacgttccaagttacaggaaagcagaaattgtagatgaattctcacttatgccggaattcgtagatattctacaattcggtgactctttctatgattgtatgttaaccgcttatactgaaataaatgatgtagaatcaatcagaacaatgttggaaggatacgctgagattgaagaagtaaaagtagcaaattcaaagagacagttcagacgttgggtagcccgtcttgatgatgataacggatattgggaagaatgtgttatgacggatgactttttacagaacagactggaatccggttccgtaaaatgtcgtttctcaactgactcagaggaggtgcagtaatatgatcgtaaaacatccaagagaatatgttgttgataaacttcaatatgcattaaatccaaaaacgattgccgtagtcggagccagccgttattctacaaaagtcggctataaagttgttgatggccttttaacatggggatataaaggaaagatttatcctgtaaatccaagagcagataaagttgccggatttacagcttataagactgtaaaggatattcctgatgaaatcgatcttgcttttcttgctgtacctgcacacattgttaaatctgttttggaagattgtgttgaaaagaaagttaagattgttgttattgccacaagtgcatttaaagaaatcggacgtggaacactgcaggatgaactcactcaatattgtcgtgatcatgagctgcctctgatcggaccaaaccttgtaggaatgggaagtccataccttaatttcaactgtggatttatcccttatcttccaatcaaaggtcctgtagcaatgatttctcagtcaggtgccaacttgcttgcggcacttggaacctcacagaaagatcattttggaatgagcttcttcgtaggacttggaaataaagctgacgttgatttctgtgagtttatatcctacgctggaagagatgaaaacagtaaatgtcttgcaatttatattgaaggactggatagtcctgatgcatttattgaagcttgccgcagtgttgataaaccgatcgtaacaataaaagtcggtggttcaaagattggtgaaaaagctgcatttgcacatactgcttctgaaaacaaaggaacaaatgatgcattttatgatgatatttttgaaaaggctggagctatccgtgcaaccacatggcaggaattcctcgatatatcaatggcattaggaatgcaaccggcaccaaagggtgacaatatcgttatgattaccaacggtggtggttcaggtcttctcagctgtgatcactttgaacgtcggggaatgccaatgcatgaactggcagagatttctcctaatctagctggaagaatccgtgcatatatgccaatgtttggttctccgcttaatcctgttgatatttccggaacagcttcacctgttcagtataaaggtgcattcacacaggtaatgcgtgacccgaatgtacatggaatacttggatccatctgtccgacagcagtaacagatgttccggctgtaacaaatctggttatcgatatttacgagacatataagcatcttggaaaaccgttcattatggaatgccagggtggtgaagaatgtcaggaagctatcatgaagttgagagatcatggaatcccagcttatccgactgctgaacaagccgtaaatgctatggttgctctctacaaatatggtcagatcaaaaataagaaataaattatgagcagacattgttactgttcactcccgtgtgaacagcaatcaaacatttagattatgatagaagttgtataaaagactacttctcttctataaaaagctcttataagaaaatgacacctcttttagggggtgtcattttcaatagctttattttctttgaattaaaatcttacccgctcccgatccggatgttctcccgaccatccgatctgcggtaaagtcatcaactgatacatatcattttcctctatgtcaaatccgaaaacatccatattctgatgcattctctcactggaagaggattttggcaacggtaacacaccgcactgcagagcaaatctgatacagatctgtgcgacagatacctgatatttttctgcaagttccataagaagtggctccttgagaactctggctcgaccgattgggctccatgcctctacctgaatacccgtctgcttacagaaatcaactgcagccttctgcatatatcccggatggaattctaactgattcaccataggagtaatgcttgtccgctctaacagattgttcaaatgatgtggcagaaaattgctgacaccgattgcccgtacctttttcgacttatagagatcctccaatgccttccatgtctccacatccaaatctctccactctgcattcagatcagaaggtcttggccaatgaatcagatagagatccaagtaatctgtacctaatcttttacaagtgctttcgagctcctgcaaagttgaatcatatcctagataatctttccaaatctttgatgtcaggaaaaaatcttctcgtggaattccactctcgtgcacagcttttcctactgcttcttcattgaaataaaaggctgccgtatcaagatggcgatacccctgtcggattgcttcacttataattgcttcatcggtgttgtctgcggctttataggtaccaaatcccactactggaatttccactccattagacaatgtaaatgtatgtctcatatgatactcccttctcttaatatttttaacctttcacttttagacacttcctgccttatcagatcggcatttgtatcttccaaactccgctttgtctctatgctatattatacatgaaccactattattgtaaagtgaaaagcaagccctttcccgacttgctctccgccataccacttttttaccgataaataagatagttttttctatttccataatcctctgatactctgctgtacgtcatttcagctgtatgtgcaataccatccatataataaactgtttatgctgtcatttgaaaatatggctgccgactacgtaaaggaaatgcaaggctcacatccgttctagatatgagccttgcaagaattgtaatccgtagattatacagtaatttttttttccagttttgttttaaaaaattgaattaatggaccgttgaagcaggcatttataattgtaccaatccctactaccgaccagattccctccccagatgcaatggcaaatatgattccaataatcacgacaacaacatctgaaagaatccttgccttatgaaatgggattttttgatgtgtcagtttctcgattataattgcgacactatcatatggggcgattcccatatctgcgaccatatataatgccactcccatggatgccatcagctgagcaaggatcaatgcaaggatgcgcagtggcagattcatctgaatctgaactacatcatttgctacataacagataaaatctgcaatatatccaacgaataccatattgataatggttcccgcaccaatgcaagattttacctgaaagaatacgactacaagaatgatcgcattgacaagcagctgccacgttccaaaactccatccgataaatccgctgattccaagattcattgcactgaatggatccacgccaaatcgtgaaagtcgtaagaaagatacacataatccaatgaacaatattcccagtaccattactccggttctttttgtctttgtcatgacctatcttccctcctgaacttttttgcctttcagcatatagattctagattcaaaatcggtacaaggagtcacatttcctggcacttcaccagctgtcacatcggatgtgatcaatccataattcatcaattcatctccgtaattttctgtatgattccatacattttcataaaccatatccgggttcaatccctgtaatctgacacggctatacggctgattcactccatttaaaacacgatagtagcctacgattgcaagcgtgcggtcttcatttgtcaccatccataccgtctcatttccttcaaatggacttttcagacgataaaatgttccaaactgcaacacttctctgtattctttcataaatgtgatttgttcttttacttctttgatctcttcttctttcaatttattgagatccagttcgtatccaaaagttccaaagtatgctacattcgctcttgtatgtaatggagtattacgaaatacctggtgattcggaacaacagacacatggcttcccatactactaagcggataacacatagaagttccatactgaatcttcagacgctcgattgcatccgaatcatcgcttgtccatccctgcggtgcataatacagcattcctgggtcaaatcttcctccaccgctagcgcaggattcaaataatacttccggaaactcatttgtcaaacgctcatacagatcatacacacctaaaatataacgatggaacacttctccttgtctgtctgaaggaagtttgctgctgtagcattcggtaatgcttcggttcatatcccatttaatatatgagatttttgactccgacaataactttgccatcattccgtaaacatggtctactacttcttttcttgagaaatcgagtacatactgatatctgccgtgtgatgtatttcttcccggggtctgtaagatccagtctggatgtgtacgataaagatcagagtctttatttaccatctctggttcaaaccaaagaccgaattttaatccaagtgcttcaattctttctgacaggcctttgatgccatttggcagaagctcttcatttgctacccagtctccaagaccggctctgtcatttcttcttgcgccaaaccatccgtcatctaagacaaacagttctactccacattcttttgctttccttgcaatctctacaaggcgatcttctgtaaagtcaaaataagttgcttcccagttgttatttaaaatcggtcttgccttatcacgccagtaccctcttgcaagtctctttgcatacagcttctgaaatgtctgactcatgccatttaatccattttcactataaaccagaacaacttccggtgtctgaaagctttctcccggttctaatttccaatcgaatccttccggattgatcccggctgtaattcgtgtcacatcgtgtgtatctacttctgcctgaatacggaaatttccactgtatacaagacttactccgattgcttctcctgcattttcatctgtattgtgacgttttaaagcaaggaacggattgtgttcgtgagaagaattgccacgcatactgtcaatagctgttatgccctgctccaatgttcgatttttaatgtagcgctctctggaccatgcaccggacaactgcatccattcataatccttatctggaagatccaggcttaaactcatcatatttaatacatgcagatttttctcacctgcattttcaatatacgcacttcttgcaattgcaccgtattcatcaaaaatggtatataaaagtgctagtttcgcaccggtcagagcgtctttcaggaagatacgcaatgtctgcgcctccccctcagactctgtataagttgccggcaatccggggagctttggttttccatcaatgatctcataactgtcatattggaactcactaatcctgctgccgttttcctgcaacaattcaattgccggatgtctgtaatctgtcgtaccgtaaaccggatattcctgtcggatatgttctaatgaaaaagtacgatcccactcatatatatacgatgtcattgggcgttcacatttctcaaccagataagaaaaatctgctttatcatgaagtcgttttccaaaatataattgtcccagatgtccattttctaatacacataagatgtaactaattttttcattgtataaatgaaaagttttcgtttcttcatgaaaaataatatgtctcatatactaccccttttataattgaattgttgactcttaagctgtctgctttttcgcatgcatttcatttacttttcttgtgatttcttccatcttctcaccttttaaagtgtagtattttttgtaaataccaaagctggcaaatgcaagaatgattggaatcacaagcattaacacgcgaatacccattactgttgctgcgctctgcgttaccgcttttgcgttgtatcctacaatctgaagaccaattcctgttaatccacctgctgctgccgtagctgccttcataagaaatgtctgtgcagagcatgttacgctttcatttcgtacaccaaattttacttctccatagtcgataacgtctgccatacagcatgttgttactccaagtgaaagacctgatccgaagaaaagcagtgcacaacatacaacaactaacaccttactctgtggtgctacatatcctgctgcaccgagcagtacaaatccagcaattggaagtccacatgcaaatgcgtatactttttcacggttaatttttgctgcgatttttgggaagcataaaagtcctgccatctcagcaataattgcaaatccaaagatagaatacagatattcatcgtggcatacacatttgaaataatatacagcaaagctttttgcaatctgtgtacaaaggttaaatgtcaaaagtaatccgataaatgcaagcaactgatcattttttacaattacatgaaatgcctgtttcagacttgtcttttctgctgatatacctactgttgattcctcttttacattaaatacagtaatgccgattgtaacgatgaaaataactgcgataataattgcaaaaagtgtatatcctttttctgcgtagagattgctctcgcctgcaactttattcaggtaattgataatataaagtccaaatgttgctactgaaaatcctgcaagacttgcgaaaaatcttggaattacggaaactttctcacgttcacgcgggtcatttgtcaggttaggaagccatgaccagtaaggtacatccattatcgtataagtcattccatataaaatgtacataacagatacatatacgtacaatgctgttcctgacagattaaagctgtggaataataaaacaaatacaactgagtttactaatgttccgattacaagccagattctgaatttaccaaaacgtgtatgtgtattgtcaacgatcattcccatcatcgggtcattgatcgcatcccatattcttgctaccaaaaacagtacgccgacaaatgccggtgccaaatataaagtatctgtaaaataaagcattaaaaatgctcctactaaattgcaaatcgcatctttgccgattgctccaattccaaaacataatttttctcttgtagacacatatttatattgcggatttttctgagtttctttttgattttccatgattctcctcctccaatactcctttgtttatttgttatttgagtgaagaaacctgtgcacttgttccttatatttgttgatacaagtatagcgtacaaaaaaagacatccgttatacctttttgttaagtgttgtatcccaaatgttaggtatcggatgtctttttcaacatttcgtctattctttttcgacgtctcctacataaatttttttatgtttcttgtattctttcagttcgttttgtgcactgatcaatcgttctcgggcagcctttctgttatcattacgatattgggtcggcgtcattcccattttctgtttaaatactttgccgaaagcaagtgaattgcgataaccacaagaaactgcgatttcctccacagatagatctgtaagtgcgagctgctcctttcctctggaaattcgaaattccgtcaaaaaatccttcggcgagattccaagactgttctgaaatattgtatataaataacttcggttaagtgccagataatcagctatatcttccactgtgattttctgtgaatagtaattctttatataggcaattgcttcctgcacatgtatgctttcttttgtatcattcgaatattgctgaatttcaatcccacgagccagtactgagaaaaactgatagagctttccctggagataataaagattttctgcagttgaactcgtatgatgaagcatttcaaatacaatttctttcagttcttctccatattcacactcgcatgtaagctgacgactgttcagtccaagatctctgacaaatctctgtgcctccgtaccaccaaatcctacccaaaggtaagaccatgggtccgttttatctgcctgataaaaggtaaggctttccggttcaatcagaaaggcctgtccttctttcagcggatacttcgtttcaccaacctgatagatacctttgcccttcattacataatgcaaaatataattgggtcttgcggccggtccatagctatgtaatggttcacattctgcaaatccgcagaaacataaataaaaatctttaaactttggttttaacaattgtaatacgtaagaatcttccataatatgcccccctctcttaatccagtactgaaaacttataaaaagctataaacaaacttctatgtttcattcctacttcaacgaatatgcttttgatgatataaatatcagtcctcctgttctcgctataattatagtgttactggttcatgtttacaattgatcccttgtttaattatcaactttccttcggcatttgttacatccgtcgcttttcttccaaagctttctcgttttgaatatttaaaagtataaaaaaacagtctgccctgacggaaaatatttccatcaaaacaaactgttcttcatattcacactaattatattttccgagcataattactttttgcgaaaatcttagataactccagaaagaaaacaagagaaaaaaatatttttcaaactactcgaattccactgttcctgtcggctttggtgtaaaatcataaagtacacggttaattcccggaacttcatgtgtaatacgctctgtgatatgaaccattaattcatgtggaatctcagcaacagttgctgtcataacgtcgatagagcatactgcacgaacgatacaagaccattcaaaagcacgttttccatccttgattcctgtagatctgaaatccggaacaacagtaaaatactgccagatctttccttcgagtccgttcttctcaaattcctcacgaagaattgcgtcagattcacgtactgcttccaaacgatcacgtgtgatagctcccgggcaacgaactccaagtcccggtcctgggaatggctgacggtaaaccataccatgtggaagaccaagttcgtctccaacaactcgaacctcatccttaaacagaattctaactggttctacaagttcaaaattcatatcttctggaagtccgcctgcattatgatgcgctttgattccttcttctgactcaagaatatctggccagattgtcccctgtgccaggaactcaataccatcaagctttcttgcttcttcagcaaatacttcgataaattctccaccgataatctttctcttctcttccggatcctcaactccagctaatttatcaaggaaacgatctgtagcatccacataaaccagatttgcattcatctgattacggaatacttcgatcacctgctctggctcacccttacgaagcagaccatggttaacatgaacacataccaactgctgaccaattgctttgatcaaaagcgcagcaacaacagatgaatctactccaccggaaagtgcaagaagaaccttcttatctcctacctgttctttgatcaatgcaacctgctcgtcaataaaagcctttgcaagttctggcgttgtgattctttccatgtcagccggacgtctgatttcagtaacattcatttgattttcctccttagtatcctctcaatatctataatgattgtaccgtcattatgattacacgtcaacacattctggtataatttgatttattgctatcgcaaaaactttagcgatttaaagcagaaaatcactgaattgtattgtagtatacaaaaacagctgttataatattaaaaataataatcagatgggaaaggtgataaaatgaatcagttagaaatattaagagagagtcttggccagtgtgatgaaatcatcctggatgcattgcttatgcgtaatcgtattgtagaagatatcatggcttataaggaggccaatgatcttccaatcttacagccggaacaagaagccaaacagaaagaatggttggaaaaaagaatggaaggaaaacgtcataaagatgaagtagaagatgtatttgaaagcatcacactgaacagtaaaagaatccagtccagaaaattgtttaactataatattgtgcttattggattcatgggagccggtaaaagtaccatctcagagtttttgaaaaactcctttgcaatggaagtaatcgaaatggatcagatcatagctgaaagagaaggtatgactatttctgatatttttgaagtatatggcgaacagtatttccgcaatctggaaaccaaccttcttatcgaaatgcagtccaaaactaatgtcgtgatttcctgcggcggtggaactccaatgagagaatgtaatgtcgttgagatgaagaaaaacggacgtgtagttcttctgactgccaaaccagaaactattctggatcgtgttaaagacagccatgaccgcccactgattgaaaataacaaaacagttccgtttattgccgatcttatggagaaacgaagagaaaaatatgaagcagcagcggatattattattgaaacagacggaaaagatgaattgcagatttgcgaagaactgattctcagactgcgccagatggacagcgagtaaaagaaacttatgaagtcgcatctcaaattcagactcaaaacaggaggagaaaatggaacagagaattaaaggaacaacaggtttattagcattgattggaagtccagtaggacattcaggatctcctgatatgtataacttctgcttccgttatcataatttggactacagctacatggcttttgacattaaggaagatcaggtaccggcagcattggatgcgatgcgtctgttcaaaatgagagggtgcaatgtaactatgccatgtaaaacggcagcagctcagaacatggatgagttatcacctgctgcaagaattatcggtgctgtgaatacaattgttaatgagaacggaaaactgatcggacacatgacagatggtatcggttttgtggaaaatctaagagatcatggtgtagatgtaaaaggaaagaaaatggtgattttaggtgcaggaggagctgcaacagccatccaggtacagtgtgcacttgatggagcaacatccatttctgtcttcaatccagacgatccgtttcttaatcgcgcaaaagacacagctgctaaactgaaaaacgaagtaccggattgtaatgtccaggtattttgtctggatgatcaggaaaaattaaaagaagaaattgaaaaagcagatattctggtaaatggaacactggtaggaatgaaacctcacgaagacctttccccaatcacggacaaatctgtatttcgttctgatctaatcgtatgtgatgttgtatataatccggaagaaacaagacttcttcgggaagcaaaagaagccggttgtgcaaaaacgatcggtggaaaaggtatgcttctgtggcagggcgttgcggcttataaattatataccggcctggatatgcctgtagaagaatacaagaaatatcaggcagaaaatgcaaaataaaactgctcccagttaagcaaacaataaaaatatgtaaccgttcagagccaacctccaaaatgctacgcatttcgtcggtgtggcgtatccgccaaatataatttcaaaaaaagagtctcaaaaatgcaagtatttttgagactctttttttgaaattttgcttggctctgaacagttacaaattatcttttatttccctgaaccaggcagatacttcctgccccgccactgagcaacagtagtatcatccagcagaacagttcattactatccgctgttttcggactttttactgaagtttttgttccactttcctgttctgttttcacagcttccggctgttccggtttgactgtctctttggttgtctgaatcatattctgcttcgttgcacttgcagtaactgcatcggaaccctgttcaaaaaattgaatcaacagctcttcgcaacaggaatattctccaatctccgctgcattggcaagctgtggatagctatcagaaccggcaagataattattaactgctacggtatactcttttgtatcattcagctcctgcccatctttttgcacagaaagcacacgctcccccgccggctgtgccggatcaaaacggacgataattccaccaacctgcagataacttccgctgtcatttggccacgcatcccattcaccactgtcatttgcaacaatacagtttttctgaatagtaagactagtctccaacatttcctttatctgtgtaccggtcaatttctttgtcactacatagtttccataaggactgacattgataacatctccatacgttaccgttccggcagcgatagaagcacggattccgccagcattttcaaaggctatatcagcccctgtggcaagcaggtacgcatcagttatgacatttccaagatttgtctgtccgatacggatatgttcccagacaccgtccaattccaccggtgaagtaccgatgacacgattcagtgctgtctcgttttctgctttgatcgtatccaatacagctgtcacggaagcatccttcggataattctgtgcttcttcataatcgacagatgttttctcataatccacatgcacacttccatcctcatccatagtacagttcagatcgatcagccccacactatttaaataatgtccactttccgatacataggtttttgaaccgtccggtgtcgtcacagattcactgagttcaatatgctcatgtccacacagccacaaatcgacgccgtccacctgtgcagccacattctttggatcaagcgtacttaatgacagctatggcttccgcatccatgctcgccacatgtgtgtccttccccgtggctgtgttcatggtgagagcacttcacatccgggttgtaatccagtgtttcattaatgaaggcttctactgcttcatccgcatctccggaaactcctccaaaaagcttaataccggctgctgccaacgctgtctgtgcaccgcctccgattccgccacagatcaaaacgtctgcgttcaatgcattaagaactcctgccaatgcgccatgtccgcttccattcgtatctactacttctgaatgtactacttttccttcctctacatcgtaaatcttaaatgtctctgtgtgtccaaagtgctggaaaatctgtccattttcatatgttactgctattctcatgataccttctcctttttcttctgcatattttttgtaaatttcctgtttgtaacagcctccaaagctacagttgctgctctgaccatcacaaattctgaaatccccaccttcaattctaagtggatgtccatcaatgagtgcatctgctattttcttcctggcaatctcataaattcgttgaaccgttgttcttgcaatctgcatagatactgcacactgctcctgactataaccttctttgtccaaaagacggattgtttcgtactcatctatcgtcaaaataatgggcggagtttttttattatcatctaccggaaaaaattctaaaacatccggaaaatggcagacttttctgcactttactggtcttggcataaactgctcctttcttgtttttcttatatattagctccattaagagcatatgtcaataacgtttttgacatatgcccctttaacttctttctttaacaaaacacaccttcgccattacttctgaacactgccgcaatactactgactataattattgcagaaaaaagtctgaaacgggaactgaatatttatggccatgaggaggtcattcatatcctgcgctgccattggcaaacagattcatatgattaaagtaaaaggcggagaagaaaaattaacctgctgcggtgatgaaccatttaacccttgcgaagaaacatatgccaaagacagtaaatagcttcttcatgaagcattctgcctctatgggcaagctgacaaataccagccatataagaagcatcattccacggtaaaggatgcctgtgaactggctgaaaccctacatatccggaacttgatcctgtatcacaccgaagatgacacactaaagaatcggaaagagctgtatacaaaagaaagctccatgtattaccatggaaccctctatatcccgaatgatctagatgaatttgaattataaataatgctcatataatgtgagcagcaagccgctgagattatcatatggtatattcaagaatgctctttgtagtctcccctcaacgatgagatgctgtcctgcgtcagcatttcatcgttgtatacttttccggttctgtactttttccttactgcatatttacatttctactattatttgattttcttatcgtcattcttgaaattatgctgatgttcacatataatgtatatattattttcagacagaacaggattatatctttgaaaaaagtggaacgtaatgtgaggttatctgtccataagagaaactgcccgaaaatgggaaatgcaggaacgacatggcagaaaggaagtgaacagcatgagcaccgatgaagaattttacaagcaatatctgtgcggtgatgaagcagggcttgaggcgctgatgaaaaaatatggcgacccgctgaccttatatataaacggttatctgcatgacgttcacgaagcggaagatctgatgatcgaagccttttcctatctgtttacgaaaaagccccgcatccgggacggcggatttaaggcctatctgtataaagcggcacggcacatggctctacgccacaaaagcagacggcagatttttttcagctttgaggacttaaccggggagccggacggcaaaacgctggtagaggaggtcgtccgaacaaaggaacggaatcagattttacatttctgtatggacgagttaaactcggaatatcgagagaccctttatctgacctattttgaaggcatgagctatcaacaggccgccgaggtcatgggaaaaagcgtgaagcagattacaaatatggtgtaccggggaaaagaacgtttgcgcggattattggaacgggaggggatcacaaatgttgagccatgaggaacgaatcgcggaggtaaaacggcgtaccgcagaaaaagagcgtcaaaaaagactgcggcggagatggattgccgccgtttccggcgtggcggcgtgtcttgcggtgatagttggtatttccctttccatgcccggtattgtggaacaaatcgagccggggactttctccggctttgaaacggcggcaacgatgttaggtggcagcgccgcgctgggatatatcgtgattggactgctcgcttttgttcttggcgtgtgcgtgacgattttatgcttccgcgtccgtctgctgaacagggaggaacagccggatgagcaaaaggaggatggtgcggatggagcttgtcagtaacctttcacaattcatcgttaccctgctgggcttctgcctgagcggcatctggtatctgaaaagccgggcacaggcgtattttctgctgacctgcttttacggctgcttcgccctcggctctctctactggacgctgtatctgcttttattttctgaaacgccgcaggtcttttatgtgtcggagtttggctgggtgtccagcgtgatttttctttatcttctgcaatacgggctttccaccgcggaggaaaggagttttgcatgccgcaaagccctgcttgccctcctgatcggcgttccgctgtgcatgttttactgcacctttggggatgtcctctccaatctgctctggtgcggcatgatgatcgttatttcccatcattccatccggggacttgcttacgcctatacacagacgggaacggcacgggagttgcggcatttccacatcggggtgctgtgctatacggcggtggagtatgccctttggacttcaggttgcttctggtcgggggcttccatttccagcccctactgctggtttgactttctgctgacgctctgcctgctcgctctgttgccagccacgggaaaggcggtggtgagatgacctatattgaaaatgttttgatctgtatggcctcgcctctgctgattgctgctctgtgtatgggaaagcggcagacaaaatttttcctgttctgctttgcgggaatgggtgcatgtctgctctccgcttatatcaacacctttcttaccgcgatttacgaggcggatgcctttgccgccacctcggagatcgctcccgtggtggaggaggtaatgaagctcctgccactgctcttttatctgttggtattcgagccaaaagcggagcagatcaaaattgccgccgtgatcgtcgccctttcctttgctacttttgaaaatgtctgctatctgattcagaatggagccgaacatttttcctttattttcttccggggcattgggacgggagccatgcacgtcatctgtggggccatagtgggcggagggcttgtctatgtgtggcggcggacatggttaaaaattgccggaacctgcggcctgctgggggcggcaattaccattcatgcaatctataacctgctgatcgcctacggcagcgcggcacagtatatcgcttatctcctgcccgttctgattttgacagtgggaaaacttatctcccgccgtctcataccgtgatacaactgaatttttcttctttgggagttgcttttgtgcagctcccaaattttttgaaaaaattcgattttgaggtgagagtttttccgagtttttgtacctatataagtgaaaggcttttttaagctgtgcttttgaggaggttggaaggtatgtacgatacagaaaagcgtgttgagctggtaaaaaagcgaatgtatgaatatcgccgccgaaaggagcggcatagagtctatcacctgtctgctctgtgtgctctgctgtttttgtcccttgcgggagctttagggacggtgcagatccagccgatggatgccgcaggaatgtacggcgcgatcctgttgcatgaaggggtgggtggatatgtgctggtggctatgactgcattcgtgctggccgtagtgataacggtcgtctgtatgaggctgcatgaacgagagaagaaacaacaaaaacaaaaaaaagaacaaaaggagaacacaatatgaaaaaattcctatctatgctattgattctctgcctgtttttaggcgcactacccgcacaagcgctggcttatgttgctgacaacattcaacgggcagacactgtagagcaggtttcggtgggcaacagctcactcgtcctgcaaaacgattatatccgcatgacgctgaacaagcaggacggctctctcacaacttcccctgccgcaacgtcgagcagtgtcaatcaaacagacaagcaaaaaccattctgtgagtttgttacatggaaaggctacggctataacaaacaggagcttgtgtatcccacaacgctccgcctgaaaaatgtgtcttttgtaaataaaacaccaaatggcgatgcaaaagccatcaaagtggagtatgacctgacgaccaagctgcccgacagcacgcttaccgccacgaccgcggtctactatgagcttgtgcagtgcaaggaagacgaatcgtcagaagatacctggggcgtactgacgaccgtcagcagtatctatatcacaggcggatatgtccctcctacgactgatagtgatgcttatatgccaaggtggggttataccctcgacgactttaccggcatggggcacgcaaacgccacagacagtcctgcaattaagatgagacgcactgtctacaatacggatcagcatacggaatcgaccgaaagctctgttcttaccagcaaggtggaaaatctgtctacctgggacgccttctttcagggaagcgactattgcggggtcgatatccgcgatgtttatgtggacggctacacttgggcaaatccatttgtaggactaacgcaagcctctgatgtgcagggcattgatattattcttccggaaagattcagcgtaacgccggacagtagtcctgccaacacctatgtggagtgtaagggcgacgtcgcttaccatttcgacagtaatgaaccaggtgggaatgtgcacttcctctggggcttccgcgaattgaagaaaggtgttgagaatgttccgacagaagcggacaaagtagaaatctccattgaggccaagcggctggccgcctttgccaacggggacagtgtgacggtggaatatgtggccgacgatgcggcactgaacgccctgaaacagcaatacggagatcctattgccctcatcagcggtgactatgagagcagaaacggcacggaatttacctttaccggtggggcggcactgctctcgccctccgtgacggcgacatgggatacctccaacaaaaacaacaagctcgtcatccacaaggacggaacgatcactcatagcggtctgagcctgaacgcaccgagctttaagttctaccagccgaaaagcggtgcaggcaaggacttgaaaatcaagctcacacaggacggtttcacatttgacattaatccaacgaaaaatgaggctgtgatttacgttgatatcccatatgccaatgcaaagctggaaaaggctgttgccgatgcggcgggaaatcttgtgttcagcggtgatattagcttccaaaccatctttgagggggcaagcttcactctggaagaactgggctacggcctaaatgagaagaacgagtttaaggtcaacggcgttcacgcaacgggtagctttgacacggccaaaacgctgtcgctggagctggccagcgtcgagggcgaggtcaataccttcaagggcaaagaaaaatatgctttcaatctggaattgaacgcttttgatctctttgaaaccgaggccgagttggagctgacacgcagcaaacaagacggcagcctgctccccaacacgctgtacttctatgtcgcgtcaagccccggcattcccctcattcctccggtgccgatcggacagctcaacggcggcggcgcgggattcagcaatctggctgatacagtgaacggcgactatttcgccatcccacccctcaagctacggggcacattgaagggcacctatctccatctcatcgagggcaagggggacgtagtcatcggaccgagtgagatttcccttacggccagcgaggtgggtatcgtcggcacgaacgcatccattattgacagctttggctatgctctcaagctcaacggacaggagcggacttataaaggaaccacctacaagggtatctatttcgtcggctccgaggcccttaacctgcatctgccgaatactgagttcaatgttattgtcctgaactcctccgtcgagctgggtgcgttcggcggtactgatgagaacaaaacaaacctttatcttggcgtaggcgcaaatggcagcgtcaggggcagagtgcagttcccggacaatattcgcgtcctcggcggtcttggtgtagatgttgcgaatatcaatctcgtcataggaggacagactgttttcccaatcaggaatgccagcgtcagcgagggcatgaagcaggcgtttagcaatatggacgtgtatctcggtgcgatgaccgaggtgggcggctggcttgccagtgcccgggcatgggtactcttgccgaatatcgttgagaccaacttccgcatgggcggcggttgggatattgaggttaacgcgttcggctatttgcccgaatgggactggtcggacaagggcgtcgatccaatcgtgcaggccatgccgtcggaggacagcggcgaggctgtccctatgctgcttgcggaagaatcaggtgtacctgtagctagcggtgggaacacagaggaaatcacagtgactgccggtgcagacgaaacgccgtatatcttgctggcctttgagaacacggtcaccgaacaggaaatcaaggatgctttgaagattcagaaagacaaccaagagattagtgtcaactgggtgggtgaggatggtctgattgatgccgacgcggacatcaatgcggacatcgacatcatacataacacgacggacaacaaggactacaacgtggcgctcctgcggctgaatgaaggcgggacctatacggtcaacacgggctcgcttgaactaaaaaaacaccaggaagccgctgtaacaccatttgaggaactggacttgtctctgaacaatcagcaggtgactggccaaatcaagtacgccgaaactggtacaaagtatgtacttcgcacctattttgcaaatgaaaagggcggagcagattatctgattgatgagcaggaggtaacggacgcaagtaatatctcagtcgagattccgcagagcggtgcgctggcacccacgggcagctactatgtgacctctttcctcatgacggaaaagagcgttgaaagtaccaacgaggacggcgaggtggaaaccctgaccggtctcgtcgccatcgacaatcagcagttcgacactcaggtgagctacacgaacaacaaccatccgattgcgcctgacaacgttgcattgaaccttgctggaaacgaggtcatgacggcatcgtggggtaaggtagacagtgccgatggttacgccgtgacaatctatcagaagcaagacgacggcacatacaaggacaccggtttcggctatgaccttgataaaaacgccacctctatcaatatggcacttactgttggcgggcaagcggttgaggtgaacgaagaaggagaaatttcttccaccacggcggcagaaaaccttgaagcaaacaagacctacaaggtgggcgtgagggcatacagaaccatcgagggcggcaaatactacagtacggaagtcgaatcttccgagcaatatctgccacaatatacgccgttgaatttgatgctctccatgaatgatacgccttgcatagcagacgaaaacggcgtgtaccatgcctatgtggacggtaccgatgatgtgctaacggtaagctgtgaaacaaccggtgtcacctacaaggtcacacggatggatacgaatgccgagattcgtgagaataccgcaggatcagggtatatgcttcccgattttgagggcagcctgatgttcaggatcgacggtatttcaggtgttgcgggcaatacgaccgccaaggatatgaccagtgtgttcttgctggttagtgtggataaaacgccgcctgtgctgactctttctgctccgatattctacgctgacaagatgacgggcgaatatcaaatcacaggcacggcggacgcgggtagcaagattttctacggaaatgatggtaaatctgtcgatgcggctaacgatggctccttcaccgtacccggtacgctggagggcaacggtggtgttctttccctttacgcacaggacagtgcggggaatgaatccgctttgcagcttgcactgattacaaagcagccgcagtatgctgtcacagtgaacggaagctacgcacaagattcgggcgatggagagtattcagagggcgaaacagtaacgattaaggctggtgagcgcagcggttatcagttcggtggttggacctccaatcgtgatgttgcctttgcggatgcaagcagcgcgacaacgacctttaccatgccaaacgccgacgtaaccgttacagctaactggaaaaaatctgtttcccctacgccaatcactcctggcgatacggtaaaatatatcgtggagcattataaggctagtaacgatggttatacgctggaagaaacggaatatcttggaggtgctatcggttcgaatgttaccgctgagccaaaaacctacacaggctacacttataatcctgatgcagaaggaagtattaccaaagggacattaaaaaagattagcagtgcatcggatatattgaccttaaaactctactatgacttaactgtttatgctgtgaccgtagaaaatgatggaaatggctctgcaactgctgttcccggatccgcaacgatgggagagacaatatcactaactgctacgccggacagtggctaccacttcaagtcgtgggaagttgtttccggcgatgtgacgatcagcgaaggtaagtttaccatgcccgcaggaaatgtgactgtaaaggctctttttgaaagaaaatcaaacaacgacgaaggaaccacttactacacattgacctttgataccaacggtggtagcagtattcatgcaatccgcacgacttctggtaagacgattaacctttccgactacatcccgacccgcaacggctatgactttaccggctggtattccgataagacgctgatgcagaaaatcacggaaatcaagctgaacgaaaacaaaacagtttatgctagttggacaaaactgacaagtgatggttcatctacccaaaagcctccgactggtgatagcaacgaattgctcctctggtctgttttgctccttatttctagtttcagcataataaacattgtactgcttgttaaaaagaaaaagggtgcaaaataatcaacatataaataagctaatgtagaaaggaggtaacggacatagtttcgttatctcctcgtattgtaaataccattcaccttaaaataaggcttttctctattttttaattcctagaaaactgctgccagataagaaaaaaggccctgacagtctggaaatcccagaccatcaagttcattctttattctaaattgcatttcatgttttcacatgatttttctagcattatcattgttaaaatctaatgcagcctactggacaggattttgcacatttcccgcatcctacacacaatgtttcttctactaccgcatagcatccacgatgaactttaaccgctgccagcggacaagtattttcacatactccgcaggcaacacatcttttctatcgacacttgccactcttttttccaatgctttgttcccctttcaaatttagtatctctattacacccgaaaaaggtaaactcttctgtgatattattacataagaatttaccttgaacgctaataactgaagtgacatatttttatttatggcatatgtcaattatgtaattgacgcatcttaaaaaagcaagtatactatgttcataaaggagataactgttatgagcttcgaaaattattttccagtatggaatgagttaaatacagcacaaaaaaaactaatttcagataatttaatcacacagcatgtaaaaaaaggaacagtcattcacaacggaaacctggattgtactggattattactggttaaatccgggcagcttcgaacttacatactttcagatgaaggacgggagattacactctaccgtctgttcgatatggatatgtgtcttttatccgcctcatgtatcatacgatccattcaatttgaagtaaccattgaagcagaaaaagatactgatctttggatcatccctgctgaaatctataaaggtattatgaaggaatctgctcccgttgcaaactataccaatgagttaatggctacccgtttttctgatgtcatgtggctgattgaacaaatcatgtggaagagtttggataagcgtgttgcttcatttcttttagaagagacctctattgaaggtgcaaatgaattgaaaatcactcacgaaactatcgccaatcatcttggttcccacagggaagttatcactcgaatgcttcgatactttcaaggcgaggggcttgtcagactctcccgcggcaaaatcacaatccttgattcgaaaagacttgaaacactacaaagatcataaaactatttttctaataatccataccgcatgcatatgccctttcaatcagcgcacggtcattaaccactgcatcatagaaacggaatccgccggaaaagttatatgtttcatatccatttccttccagaatacggctcgcaatataactgcgcagcccactctggcatatcagataaacaggcttttccttctcaacttcattaatacgttccctcagttcatctacaggaatgtttttaaatccattaatatggcccctgctaaattcacctaccgttctcacatccagtaacacagcatttttatctttagaaatcttatccatatcttccaaatgccattgttttaagatcccttttgctatattgtctatcatgaatccggccatatttacaggatccttggcagaggaataaggaggtgcatatgcgagatccaaatctttcagttgggttgccttcagccctgcatgaattgctgttgccagtacatcaatacgtttatcaactccttcatatccaataatctgagcaccaagcaaacgataagtctctttttcgaaaaccaccttcattgtcattacttttccaccaggatagtaaccggcatgactcataggagaaagaattactgtatctacctctaatcctgactttttggcattggtttcattgatacctgtagtggctgctgtcatatcaaatactttgataacagagcttccctgactacccaggtaacgactatcaccaccgcaaatattatcagcaatgatccttccctgtttgttggcaggtcctgctaaagagattaacgcatcatttccagtaacataatgttttacctgaactgcatcacctgcagcataaatgtctggtacagaagtttccattctgtcattcactacaatactttccttgataccaagttccagaccggcttcttttgctaatgctgtgtctggtgtaacgccgattgccagtactaccatatcagcatgaagagatggattatctttcaatagtacctccactccattgtctttttctttaaatccttctactgtatagcccaataccagttttattccatgctttctcatttcattatggatcatggatgccatatccggatcaaaaggactcatcagctgcttaggccgctggacaattgtaacatccatgccaagctccctcaaattttctgccagctccagaccaataaaaccgccaccagccaatacagccgattttggatgattcttatttatatattcctttatccgaaaagtatcttctactgtacgaagtgtaaaaagtttatcaatgcctactccaggaagtctcggctgtgttggttttgcacctggagaaaggatcagcttatcatagttttcttcaaatatttcaccgttttctaaattcttcactgaaacagttttacgttccggatgtatggagataacttcatgatgaattttcatattaatgcggaagcgttttaaaaaactctcaggtgtctgtagtgtaagttcttccggatctgtgatcacatctccaatataatatggaagcccacaattcgcataggatatatatccggatctttcaaacacagtaatttctgcatgttcatccagtcttcggattcttgctgcggctgtagctcctccggctacaccgcctacgattattatcttcatcttttttccacctttcctctgtgaagcatttctaaaataccgaacttatttgctagttcagactgctcctctatattgatttttctaactttgatatctgcacgttcactcgcaatctcctatacgacagaagccgacatacggcaaggtgcacaccaagaagccccaaaatccaaaagaacaattttcttttatggctttattataatctgaacttcatttattttctgtgatatcatcacattattatcataatatcttaaaatgtaaagtgaattaatcgcattataaacgaaaaaattgcattaatcgaaaacatgtgctctacttatcttgtagaatttttaataccctacagctagtgaatatgtctcaccctaatgcaaaagtcatcatccggacatattcaatttcattattaccttatttcgtcagaaccctataattttctttcttattataatctttatggattccgtcatcttcgtacagagtatagctgctgccttcatatccaagcatcttaagcttctctgtatcaatatcctttacgcactcagctacttctgcaaccggaatgcatttgccgcttcgaatgaaaagtggtacttcattgagggcaacatccacataatgaactccttttgcaaggatttcttcgaaaatggttccatccggcatgaacttgatgaacttcatttcttccggcaggtaaacgtaacggcctcttgcgttctgttcataaaccggtgcgatcatgatttcgttgccaagcatcaattggttttcaacacggattgccatcttatcatccggataaacaaatccaagcggcttaaagtacatatcatcattcagtgcagctttcatatattcactatagagatatggtataagacgatatctggtattaatgacactacggaaatcttcgatgttttcgaactggtaacattcctgttctcttgttccttctgccgcatgatcgcgcatcagaggtgtaaacacaccgagcgcaaggaaacgaagcagcagatctctggtcgtgtcaccgccaaatccgccaaggtccgcacctgtgtacataaagccacacatattcagggatgggagcatcttcagatttaaaagaatgtgtgaccaccaggatttattgtctcccatccaaactccaccatagcggtgcattccgatgtaagaagatctggagaacatcagaaaacgtttttccggatcaattcgctcgaatgcttctccggctgctcttgtcatattgtaaccaaaaagattatgtactttgtcgtggcgaatctttttaccatctacattatgataaaatcttttataatcttccggactgttcgcaatgtttatcatcttttcctgcatagcccacggatggaccttaccttcggtatcttttgcaaattctccggcaagttcttttgcctctgcaagtccttctgaagaataaaagattgccggctcgttcatgtcattccaaaatccatcgattccctgatcgatcagaaaacgatatttatccccgaaccatttacgggttttcaggttcagcatatccgggaaacaggtatctcccggccatacagctgcaacgaaatcactgccgtcttctctcttgcagaagtagttgttttttacaccttcctcatagatctcgtagcctttttccaccttgacacctgcatcaatgatcgggatcaggcgaagttcctggtctttcatttcctttacaaactcagggaaatcagggaagtttttctcattaactgtgaagtccttaaaatcctgcatgtagtcaatatccatgtagatcatgtcgattgggatatgattctcacgatatccttttgccaccgcacggaaatcttcttttgttgtataaccccagcggctctgtccaaaaccaaaggcaaactttggcggaatgtagctgcgtccgatcacatgacggaactgttttacgatatcgtaagcattctcaccttcaatcacataaatatccagatctgcattttcgcaggatactttgagagtgtccattctggtatatccgatgtcaaaggtcagttctgacggatagtcaaaaaacagtccaaaagtagtcttgccactcacgacaataaaattgtgagctccgtacagagaacgcttgtcctctgtgtgtaccggatcatctgtgcagttgctgatataacagtaccctctcttgttgattccacggttggattcgcccagtccataaacaatgtcatcttcgtccataatataggtaaatgcaaatccatcattctggctgatctctccgtatggaaaagtgctctcagttgtttcgattttttcagtcagtgcctccgtgtcaaacggagttccatatctgtattttctgatcatctctctgttacctcttattttttatatagtacaaatgcttcatatggtttcaaaacagtttttgcttcaaatacttttcttccaaggtttgtaatcagacactctgcgtctttaaattcttccggcacttctacttctgcattttggtcactgaagttgcagacagtcagaagtttttcctgatcttgttttcttgtataagcaaaaatctgctcgtcgtcacggtaaaggggctcaaatccaccgtaaacaataatgtctttttctttacgcaaacgaatcagtttctgataataatggaaaatagaattcggatcttcaagctgctgtgctgcattgatttctttgtagttcgggttcactttaatccacggctcgccatctgtgaatccagcctgtttactgtcgttccactgcatcggagttctcgcattgtcacggcttctcagcatcagacatttcatcatgtattccggagtcataagacctgattccgtaaactctgtaaagaaattgatgctctcaatatcacggtaatcttccagtttgtcaaagtaaatgtttgtcataccaagttcttcgccctgatacacatatggtgttccctgcatcatatgaagacaggtcgcaagcatttttgcagaagtttctctgtatgccggattgtcatttccgaatcggctgacacttctcggctggtcatgatttccaagaaacaggctgttccatgctttaccctgaagttcttcctgccatttgatcataatatttttaaactctttgaagtcatattttgcagtcgtccactttccataatctccgcatccactctccacatgctcgaattggaataccatattcaattcatttcggtcatcacccgcatatttctgtgcttcttctattgtaactcctgcggtttcaccaactgtcatgatatcatattttgaaagaacttctctgttcatttcctgaagatattcatgaattcttggaccatgtacacagtatggtccaaaatctccataaagaccgttattcatttctccatccggaaatcgctgatctttggaaatcatactgatcacatccatgcggaagccatcgattcctttttcacaccagaatttcatcatatcataaacttcctggcgtactttttcgttttcccagttaagatccggctgttttttcgaaaacagatgcatataatacatctgcgtctgcggatcatattcccacgcagaaccgccaaatactccaccccagttattaggttcttttccgtttacaggatctttccaaatataataatcacgatatggattatcttttgactttcggctttcaataaaccagttatgttcatccgatgtatggttgactacgagatccatcagtattctgatatctcttttatgagcttctgacagaagttcttcgtaatcatccatagttccatattctttataaatcctgcggtaatcagaaatatcgtaaccattatcatcctgaggtgattccagcatcggagatatccataacacatttacaccaagttctttaagataatctagtttctgtatgattcctctgatatcccctacaccatctccgttgctgtctttaaaactttttggatatatctgatataccacactttctttccaccattttttctccatgttattaatctcctgttaataatttcttttcggtgtctttatcataaaccctgtatctcagcaaaatcaacaggtttctcgcgaaacttaaaatctaaccaaagttttaattttatttttatgcatattagacaaaagagggactctgtcattctttgacagaatccctctttaccagataaaccggactttttatatttaactccttcaattcttctccctgaatcagctgcatcagatgtttcagtgccatatgtgctttttgtcggacatcctgatgaactgtcgtcagtttgggacgaaccatactcgcatacacgctgtcatcgtaacctgtgatggaaatttgttccggaaccttaattcccttatcaaaaaagaagttcatcgcttcaattgcatcatagtctgatgaaaaagccagtgctttcgtttcgaggaaatgtggtaaaagttcttcgtatttcctgagacggtattttttctcgcccggaacaacaatgtatcgggaacgactacagaatcctcccttcttttccattgcctgcttgaagcccgtccatcgataatagtcgctgtctctatcagtttctgcaataaacaaagcctttttgtatccacaggagtagagatattctcctatctggtatcctccggagtaatcatctacaccgacattctgaaaggtatatgcgccttcaggataagcatcaatcagaatcattttcttattcagcttccgcgaaagactgcgatatctttcctcattatatcccaggatgatcagtccctcaacattccatttcgaagcaatgtctactacattctgaatgtcttcgccaccgatgagcataacataatatcctttttcttccgtttccatacggatgtttccaataagttctcccacaaacgggtcctgaagagactgcataccatgagcataagtaaaacccagcactacacctataattctggaaccatgaccggaaagcatcactgatcccatatgaggaacatagttctgttctttaaggatcgctgtgatcttatcaatcgttttctgggaaactcttttggtatttccatttataacatttgatacggtggtgcggctgactccagccatttcagcaatatcctgaagacgaatcatctattatcctgcctccttttatatcttgtgtatcattatttacgaaatccatcgcttctagtacatcttctaatttaactttcatgctttttccttacattgccttgcaaaactcaaatgccacataatacacataatcgttttttgaaataaaatctgtttggctatttacaagatcatctaaagccggaacactcattgcgtcatcatcataaagaaaagcaataagtggctgctgcttattatatcggatatctacaacattttttatttcagttgctgatctaccatagtattctcgatcttctgcgttttctaaaataggaatttccgttgtattcatccgttgtgacaaacttgtaaatgaatgctccatctggtccagcaagcagctctgctgtctgcatttctatgctatcctttgcaataggagaaatgtaattctgtggttttttcaaacggtatatggtaaatccgactattgataccgcacaaatagatataactaataatatacatttcataaccttcagacatttctgtttatttatattgtctctgatcacttcaataatatttgtttctgacttctgaattatcactcatacctaatttttctgccagttgcttttgtgtcatccccaaagacttgcgtttgcctgcaatatattttccgattttgataatatccatccatcgcacctccttttcttatattaatcgtactctatttgagaaaaaaagcatacccctcgaaggtagaatatgaatttcaagcctatctagtttgccaaatagaataaagatcttatatagcagcttcatatataatcttacagatattgttactgtatcatatatgttccaaacaatgtgtgatcagacagccatttctcataaaatccttcaatacaaatctcccacatatccatctgcttccagatgcatatagcactcacccacctgctctgattccagaatctgcaaaacgtattccatacctgtagcaagttcccttgttttcaactcttccagcggaatccaataaactcttccttcctcagaactcttcaattctccggtaaacttattcgctttatacagggtaatgacatagtgcactccactcttatgccaatgatataatcctccaagcttcggtacttctatcgtaagtcctgtttcttcccagacttctcgaatcatagatttctggaaaatctcatttgcttctacgtgaccacctggaaaagttgtaccggtatagctatcatttactttatccagtaccagtacgtttcctttatcatcctgaatcatacacatattcataaaacagactttctcaatccgactctcttttttttcattcagtgattttctgacacgtttgttgatatccgatcgtttggatttataatgcttgaagacctcgccgtatggaatccagatttctgcatcttcgattctttcataaacggaatccaccacttcttccagatgtttgtcattcggaaatgtgcattttttcatataataatctctggttgcctgaaacatccattccgcaatcttttctttctgctttatttttaactgagagtacttcttattcgtttgcagtagtctcccatctatcatcttatggtttttccgtgacatcggtatgacctcttttcttctttctcattcaggttttactataccacagaatcttgtctgcgtcatacttctgagcttcgatgtcctctttttcttctcttagtggacgttcctacaacatcctgcatcgaaatatcaacccctgtctcttccattacttcgcgaatagcacaatcggttagactttcaccaaaatttaaggtacatcccggaattgtccacttcttgttttccttacgcttaagcataagaagtgtcctagcttcaactccttactatactgtttcccagacataaaaaaacatgctcctcgaaatatgtctacggtggcagtaatccaaacacttcttttgactgttctggtcttactcaatggtgctacggaaaagccggaatcagcctgccacgaaccgcacaggcacagtatgacgcaacccagcatatcccgttgtcacaggcacaggctggcgatttggtctttttccattccacttacaataccagcaaggaagccattgaagcaaggacaacggaaatcagtaaataccttaccaaagaattacaggacttgaacgccaataccatcagaacagatataccaaccagtgcgaccgttacaaatgtgctggtctggaatgtagaacagtctggaacggacgattttaccgttgcctacgaagtagatcagcaggtaaaagagggagaacagacacaggcagtcacagaaaactataccgtgaccgttcatgtagataaggacggtgcaatggtcattacccagaatcctacccttgctccgtcggtacagaaatcaaagtatgaaccgaaagtacaggaagccgatgtcagtgtcagttccgacacagttaaggacgctaccgctttcttggaaacattctttaagctctatccgacagctacggaaaaggaacttgcctactatgtcaaagacggtgtgattgctcctgtatccggcgactatgtattttcggaactggtaaaccctgtctttaccaaaggcggcgacaacctcaaagtcagcgtgtccgtaaagtatctagataacaagtcgaaaatgacgcaaatctcacagtatgagcttgtgcttcataaggacgataactggaagattgtagaataaatgttacagcagaatagtatggtaattgtttatccaatctatactattctgcttacaattagattgacaaaataagaatccctctcatataattggttgcaatggtattgaggaaatacaaccttaaatgtataatgggaaagtagcattgcaggaatgaggtaggctaatgaataaaatattgattattgaagatgatttagaaataaatgctttattggctgattttctaaaagaaaaaggatatgctgtgcattgccaatatgatggacttcatgttttggattttttgaataaagaaaaaattgatttgattatacttgatattatgcttccttatcggagtggtgatattattttatctgatgtacgcaagaaatttacgatacctgttattattatttcagcgaaagaaactacacaaaataaaatcgacttgcttcgtctaggagcagacgattatatcacaaaaccttttgatatggaagaagtgcttgccagaattgaaagtaatctgcgaagagtacaatttcaaaatagcccgacagaatgtttgcaacataacaatctgactttagacctagagaaaaatacagcatttttgaatggaatagaattatccttaaccgctaaagaatttggcattttagaattgttgatgaaatatccagataaagtattttcaaaatcgaatctttttcaaagcgtttgggatacagaatatattgctgaagataatacacttaatgttcatatcagtaatttacgcaataaattaaaagcgatatgctctgatacagaatttattgatactgtttggggcattggctaccgcctacataaagctaaggattaaacgttccttagctttattatttttttaacttttctcattacgatttaagaaattctttaaaattgcccgttatactggtttaagtaaaggaggtttgggatatgagttcaattattttagaagcaaagtctttaaccaaagaatataaacaaacattagcattagaccacataaatttacaaataaaaaaaggaaaaatttatggatttattggtcaaaacggagcaggtaaaactacttttttaagattagtcacagggcttgcgtttccaacaagtggtacactttctttatggggaaattctggaacagaagaattgcagaaacagcgtaaacgaattggaagtatgattgaaacgcctgctctattcccgtcaatgactgcctatcaaaatatggaagtacagcgtattcaacgaggcataccagataaatcagttattaaaaggacattagatatggttggattgcaagatacaggtaaaaagagtgtccgcaatttttcattaggtatgcgtcaacgattggggatagcgattgcacttttaaatacaccagaactattgattttagacgagcctatcaatggtcttgaccctgctggaattgtagaaatcagaaatttattaaaaattttgaataaagaatatggtatgaccattttggtttcaagccatatcttagaagaattgtatcaaacagcatcagaatttattctgattgaccatggaaaaattatagaagagatttccgattatgaattaaatgaacggtgtaaacgacatctagcaattaaaacaacagatgttcagaaaacggttctggttttggaagagaatcttcatacagataactttaaactaatgccagatggcataattcgtttgtatgattatttgaatgatttagagacagttgcgtctgctttggcagaatcgcacattcttgtaacaggactttctgtatctagcgatactttagaggactattttttgagcaaaataggaggaacaaaagatgtcaaatctcctaaaaactgagttatataagttgtttcacagttggtatttttggggaattggaatattcaatctccttttaagtagcatattgctgttagatagtaaagaacgctcttcaaacttaattatggcatcattatacaatattccgttactctattttttgagtatagtgtttatagcattgttcattggaagtgattttagtggaagaactttaaatacttatattactgccggacataaaagaagttctatatttagagtaaagttaattgtatctcaaataggttgtattatcattttggtatttccattatttgtacatggaattattagtcaattttatattggagaaaaacttttttggaatgatagcacatatactatggttttactaactctgtttgccatgataacactgtgtgcattaccgatgttttttgcttttatttttcgtgatatggggaaaacactgacagtttcaatggttttattttttgttatgatttttttgctgaacagtgaatctgcacaaataatcagcagaataataccaatgggacaacttaggttaatttcattgcaaaaggtctattcgacaaacttttgcttgtttgtagattttttatggaattttattttatatttcattgcaggtagtgcttttttacatacagacttgaaataaccagaggtgttttttatggataaattattaaaactggaaaaatatcagttgttacataattctatttactggtgtggtatgattggaatatttattttaggattttttacagcagatacttatgttacagaggtcatgggaccgacagaagaatttgcttcttctcttgctgatatttttaatggaatggtgtatgattctacgtttcttcttatcatcatgtcggctatacttgcattgattttaggacaggaattttctaagagaacaataaacttagaggtcagtgctggacattccagaaaacaaatttttacaagtaaaataatatcgtatttaattgcttttaatcttatggctcttgtctatccagtttcagggtgcataagggaatttggacgctttggtgttgcagacgtgggaatgtttttttacaatattataaaagcaatcatttattcttgtctgcttaatagtgcgatatttctaattgcaatacttatttgttgctatttacaggatgctgtaaaagcaacctcggttacagcaattattatttttggtcttagcttatatcttggctatggaatgatgttgagattaccagtcggttttttacctacttatcaaatcagaatcgttgtcagcatgaaaaccttttttcaaccgatagctattttagtaggatgtatatggtctggtatattggtattgctttcgtggataaaattttgtaaatgtgattttaaataggtggagaaaatgtctaacatagaatggattttaattatcataacaatatttttagtaatactgctatttcgatatattcaattaaaaaaacaaatccgtaatcttgcggatcaagttaatgaattgaattttggaaattcacagcagatgttagacatttcgttgattgataaagatttagaaagactggctggtatattgaatcaatataatatcagacaacgacaggctgttgcaggcgtattacgcaatgaagagtatttaaaagaatctgttgctaatatatcacatgatttgcgtacacctcttacagtcattcttggtcatttacaattattgcaaaaagaaaattgggaattcagtcaagcacagcgtgtaaaagtgatttttagcaaagccgaaaaaatgaaagaattggtagaaacattctatgacctttctattttggaggaacagcagacagttccagaaaaagaaaagtttaatatatctaatatgttaataaatttaattacggaaaatgccgttgcattagaaaaggagaatattttacccgaaataaatctcccagattattcaatatacgtatattctgataaaaatatggtagaacgaattttacaaaatctgttgacaaatgcaattaagtattctgttggaacgataaaaataacacttatggagaaagaaaataataatattatatttaccattgaaaatccaatgagtgacagttcagaaattgattgcaatcgactttttgaccgtttttatacaggcgataaatcaagacataatggaagtacaggattgggacttgcggtagtaaaaacacttgttgccattcttggcggaaatattgttgcaaaagtacatgccaatagccttattattactcttgaattataaagtattgaagatatattcgtatgataattcattgaagagtggacatcggcagacatcataagaaaagcaaaaaaacttatgattgaaaaagggcatacttattaccaatcccgtaaattggacagagtacccaaagaagccgtggaagaattattagggattacattatcagacacaaacgattgattgtacttcttgcatatcatgtaaggagtgaaatcatggcaaaagaccctattaagaaagcacttttcttaatcgtgctactaccatcaagaaacacttttcctatttctacaaaatggaaacagacgaaatcgaacctatccatgttcaaaactggcagttgaaacttgcaaaagattttagccctaattacattcgtatcgtacagggaatactttctatcgcatttgacagagctattgttcttggaattgcgaagaaaaatccttctcgtatgataggcaatatcaaaagcaagaaaaccaaagttgatttctggacattagaagaatttcaaaaggttatttccttactctgtaagaaagactattatgaacattatctgtttatatcgttctggttattatttatgactggtatgcgaattggcgaagcgtcagcattacattggtcagacatagattttgaaacaggcttgcttagcattaccaaaacattatattaccgaacaatgacggactataaattcgttgagccgaaaacacaggcaagtatccgtactatttatattgattcagatacactcaatgagctaaaggcttggcaaagtgttcagcaacaggttcttcccgattgtccacttgtactaagttataacggaactccaaccagtaaaacaacgcttcccagagctttggaaaagttgtcaaatttagcaggtgttcatcgtattaaaattcatgccttgcgacattcacacgcttcattgcttatcagcatgggcgaaaatcctttacttatcaaggaacgtttaggacatgaaaaaatacagacaacactcggcacttatggtcatctgtatccaaatacgaatcttgaagttgctaaaaagctgactggaatattacaagtacaatctgctactgaaagcattgctaattataccagcaatcaacatacagcaatctatcacagaacagttgaagaaaaataatgcaatgaaaatgcaatcctataaaggaaaagctgtaaaacccttgtaaacaaaggctttacagcttagctccaactattcaaactcggcaagtccaaagatattcttaaacatatttatttaagttttgtatcttttttgccattattttatttcagtttcgtatattattttggctcgctgattttctgttgccaatttgttgccacttcattataacaaattcatgtaatttagcaatcctcttttgcctctttttgctccaataattttctattcgaggctgttataagattttgaattattttttgcatggtcttactattaaatacactaaccaacagttcttcaaattcagttttagaatctattgtataaatatatcctgaatcctccttattatttaattcatcagcaatgtcttgttccaatacaacttttactggatatcccgctattccataaccaacaaacataactctatatttataattttctatttgatttgcagtcaaatacatctcatacttaaaactagtttcctcaattacacctagtttgtcttgaatatctacacgcatagatgtctgcaacgatgcggctaatgctgccattgctcccattgtatcatacgattctatttttccatcatatttacgaacatttgcaacaacaaaacctttcgtaattttttctaactcattacatatgtcactcataactatatctggcataactgagtcaactgcactaaaattgtaatctgttttcaaattgtaccccattttagtcctccataatttcaaatactattggcaaatgatcactaatctttttatctggatgattgtttgcatcaatcaattttctctttttggtttcacataatattttcaattcatcatctacaaattgtcctcttaaacaaggacgaatcattacctgatcatacacattccaaaaagaattttccacctcattgcctgaataataatatgttcctggtggaaacgagaaatcaccaagtaaattccacataggattatagaacattttaaaactctcatccattattacacgatattttttcattgtgtctttatataccggtattccatgaaaaccacttgctcctaaacaccccgtttcatatggattctcattaatatcaccaactataatcgtcttctcaatgcccaatttttcttcctgtatttgtatttcctcaacaatacgggcaattgcgattcctctcttaagcacatccgcatacaatttactaggcaaatgtaagcatgctaaaaggtacatattatcgataatctgcatagagcaatatttattttgaaatgccggttgtatatttgcttttctttttaggatagtaattctgtcgcatccaattgttatagcctgttctataacaatattatataatgccagcattttcttaagctcttcaatatctgattcatattcagctaacgccaaaatatctatttcttgttctactattatatcagaaatatactcatttatattttcatttttattggtattccaaaaacatactcgcaattttttcactcatttatcacttttttaactctacttattgttctcttctttttgcctctttgcgtaattcttcacaaaattctttgcaattaattcttccataaagtcctggtcttcccgccgtcatcaaacgttttaaacaatctggtacaccatcttcacttttgaaatgaattctttcttctggtccccaagccccttgctcttgattatcctcatggacatcgaaatcaacattatcagatgttaacagatattctatcgcttcttgtttttcattttcgttattaaaatgaacctgtccgttttttccaaaaatcaatttccccattatatccctctttccttgcaaagcaataatcatttattatcatctacaatatacttcaattcttctactgtaacaatataatttttaaatctatgcaacattctatgacaatttgcacatacgcatattaaatctgtctccggatttataactacttcttgctctaatgttgctaaaggttttatatgatggacttcaatataaccttttcccaactcaccatatttttgtccaaaatcaaatccacaaatcatgcatttcgttccatgaattcgtattgctgcctctctattcttagagctacgctcatattttgtagtataatagacagttctctttccctcagtagttcctgctgtctcttcttgaacggtttcttcatcccaattgatttcatgtttagatgcatttctaattctttctataacctcgcaattccagtgatatccccgataaaaatcattttcatattcttctggaaccgtttctaaaactttctccaaagattctttgtacaatcttttcgtaaaatcactgcctgtcggatctatttctctcgaaaaattatgattctctttaagatttttcacataatgtgtcacactgattcttccatcaacgctcgtttcaaacgcattctttaacgcctccggcaaagaatctatgctcacattacgtagcgacattcttccttgaccggaccatgctcctgctttatcattattttcagtatatactcttataagttcctcttcttttgataaaaatcctaatacttcataatagtctttttcactgttaaaatgtaaaatattcccccagtttaattccatgaaattccccttatcctctaagtccaagttcttttgctacctttttaatctgacaaataaaactatcctctttacgttcatctgacatttctatcggagaagttgttgaccatctatatatctgttcgatacttccatatcctcttttaaataatcttgcatactttatacagttagctttagacggtgcatctgataatattatttttaattcttcatctttccatttctgccccttatttgacgtgtcccgcaaatattcgttctctttttcaaaatcaatcaacaaattattcactagaatcattttctcatcatacgacatattgtcgacatcactttttaacgcatcaaataatttttctttaaattcttttctcttcaactaactttctccttatttaaacataatacttctcaatacaatttaacaacccatcaaaatccagttcttgaatttcataaaattcctctgttcctaaccccgtattcagtactgtctgatacaaataaaaatcatatataataggagctttatttttccctagcaaattatctctaatagtacctgtcttagagatcaaacacacatattgatacgctctatcaatatattgggtattattgttcggatgagcatatgtataatgttgtgtaggtgtcaaggcaatcaagttctccaaatagtctgcaattgcaggataatcacttgccggaaatatatgatgcatctgtgtagctggatccttgatatgcctttcatcataaacttccgtctttccatttcgatactgatcattaaatctacgcaaattctttttagctcgattaatacgatacgttgtcatgcagtcttcactaggcttcggcaatgttatctcatactcaattctcgtcatatctttcggtttctcagataaaatatctctccaatttctctgattatacataatcatatcttgagtaataatatcttttgatatgtgacctctttccgttccgcatttccgatatttacaagctaatggattcaacactttagtaaaaattctaccacattctgttgctccatttatcggcgtataattgattgtaaattgcgtatatgcatcttttaattctctaaaactgtttttatcttgtaacctgaaaaagtattcaaatattctataaagtccactatccttaagaactttttcaatatataaacacaagaagttaaaactatttctttctctgaagcttatatactctaacaattcttgattcacgatagaatacgtgtatcctcttccacttttttcaccgtgaattacgcctgccgcatccagtaactttattggctgtccaaaatacttatcatattcatttgatgctttctgagtaggatttggtttgctaaaaatttgttgaacattttccaccgtataatcactataccagatatcatttactgtaaatcttttatcctctctattactggtatattccacaatacaatcagataccaggcatactacatccattgtacatttttgatctatccaacgcccattatgtgttttcctgatatcataatcatgttcatctaaaaatttttgtattgttgtattatccattacaacactcctttagtaccccataaaaaaatacacttgttgcatccacgtttaatgaacgtgtttgatagtttcttgcgatttgataaaactttctatattctgcagaagagaaatattccatttgtctttctgataatgccatcttttctttaggaatcaatactgcaaccgaaccatttactactacatttccagtattacgcattacccttggtttatatgtcatattcggagttaaataaacattctgatttcccacaaatttataagcactcaaattttctacagtgtctttctttatataagagtcatatcccggaatatcaattatttcctttccatcatcacttatatttcttgatttaataactcttaaacaatctttgcctttatcctgagttgtattggaattggtaatctgtctatctctgaataccgtaaacttatcaaaatcaagtctttgagaaataccatcaaaaaaatcatttctataaataatccagtatggatattccttatctgtaatatacttctgcttttgaaccacggttttcttcaaagtcaatgattccactttagtttcatttggcttttcgtttgtaccaacaaataggcaaattgtttctaccagcactcccttgaaaccattttccccatagtcctgtatacaatcaatttttttagttgcaagcaggtcacgagtttttctgaattccggggtatttaataccgcttttggcgttatcataacaacataatctgatagtgtcattgccttttctagaaagaactcaaatgtattagttgtttctttattgatgttgtttttcagatactttgcggcatcttttgatttcagctttgaaaatggagggtttccaataactaaatcataatgcttgttaaaatcatacaacaatgtgtctgcttgaataaaattcaatttcatattagatggtatcttttgcttagctaacaatagtcttaatatttccaggttacgaccatcaatatctaccacatcaatatttacttctttggtttcctcatattttttgaaaataaaaggcaagaaattccctattcctacggatggttccaaaatagttatcacatctttctctatagatggcaactccttaaatatttcattcaaaataaacttgttcgtataatatgcagcattattttccctttttgaatttgttaattcagcaatccttgctaatgatgcatttcctaaattgagcggattattctgaataaatttaatcaaattctctgcatcttccaacttataattctctatcgttttatttataattgcagttgtaaaatgctcttgttccataaaattttttatattctccgctatttggaaaaatacatttgtcggaactgcttctccaatactttgtcttatctttatttcttctttttttaacaaagcttttttatttttttctggaagtgcatttaattcttccagagaaaaatttacccatttaaattcatctggaatagtcataattttcataagttcacgaacagaaaatactctatcttctttcggatgaactgtattttgacttgccagctgatcatttcttgtatgaatacatggtgcaactttatcccagtattgacgtgtatacttatcgccgtttttctgaatattaggtacaattttaccatccactattttatgtggacgtttcagttcatcttgattatcaaaagcgcactcgccttctttcaaatcatgtatccaacatctcattctctctggatatgttctaaatgcatggtaaaaatcgcttgaacaaatctctccccattcaagttccggcatattaccgataatacttctaagacttttttcttctacatacgctggatacaactctattggagatacatattctgccatctctctatttacacctataacaacagtacgtgttctagatgaattggaaccataatttttaaaattcaatattctgctagcaataatatacttttctcctaattcttcatatataacatcgcctattgcctttaccgaaccatctggtgctgtacatccagttttcataaaagcagccacattttcaaaaataaaaaatctaggatttattttttgaaccaaatgtaccgattctaccactaagctatttctaataatctcattttcggctttcttatggttagcaactgacataccctgacaaggcggagttgcaattagaacgtccactttatcgttgcccatcttttcccatttttttatttctgcaaaaatcttattttttgtttcttctgtcgttatatcgtcacagatgtatccagaatcgaatttacatttgccattaaacttttgaacatttattcttctttcaatcaattcatttgttgctatacattcgaatcctgcttttttaaatccaaagcaaccaacacctgcacaactaaacaagcttatatatgtcaatgttttatcttttaacatcttgatacacctcgctgaccatgattattttttctagcatctgcaggctttatagaatcttgcggaataagccatgtttttcctttttttataactccatttatacgattttgttcgcaaagaacagcaattctccttgaagaaatcccccactcttttgacatctccattgttgttaagtaatccatattcatcctccgttagttctcctcatcattatattcatttatctgaataattgcaagcttttttatcgaacttatgttcttttctcgatattttcatatttcattatttttatgataaagggcagctaaaaagccgccctacacgctacgcatagacaatcttttttactacaatctcctccacacaagcccggatgttattcattctcctaacccatgccatctgatcctgcatcttcaatttttctgtcactccctgcttttctttcatctgttccatcagtctgtccatcatctgattacactcctcgtcaacctgatgcaaatgctcatttaactttccggcaagtaccaactccagatataatccttttcgatgctctttcaagtaagtttttctcaacattccatactttccaatcggatactctgtctcctccgggagatacaggtctggataatacagaccgtcctctcctaaagtgtagctgattccattttctcccataatgtgtttttccatgattgtcctcctatcttgcaccccgatctttattctgtttgtgggtacgctgtttatttttctgttcattctgtatttcctgtttcttttctgccagcttcgctctaataccatgtgctactggctcttttcctgtttctttcttccatttttctattgcaatccgatactggctatactcagttttggaaaccttaaaatcttttaaaaattcctgtacgcttctataaccaattttctgtacaatccttggaaggtaatctttcatatctctgatctgacttgtcaatgcatcaatttctccctgcaattcttttttctttcttcccttaaaccagcctttgacttctgacagttcttttttctttgcagaaagctgtttttgtttctgttgaattgcagtattttgttcgtccagttctttcttaactttgaaaaatttcggatacttagatgcaagccttgtcatttctggctgcttcgattctgtcttttcttcttttatcttcacactttctggtacgatattttctgcactcctctctgtttgctcaggttccgttgttcctgcctgcgccacgtgagtctgttccgacacttctctgaatttttttaacagcacactttctatcaaaaattccagtgcttcaaccgccactgctataactctgccaaataatcccggactttttccatgccgagcaatagatttcttaattgattcagtaatttgttttcgcttcacttccagtatctgcggctctggtacgccactaatcaatgccatatcaactgctctgttccattcctgacgtttctgattatccgcttctatctcatgtgcttttggattgttctttccaattttctttgttgcaagatacacaccaccacgctcaaatacctgcaacttctgtttctcgtcctgcacataaatattgattaagtctgtataagaatgctttacttcatccagaaatgaattactcttaaatcgttcatctttcgctgtaaacagcttcttctcatacacttcgccttttttcacaatgtggcagccctctcgtatctcaccatcttctcccagtatctctttcttggttcggacatgttttccatgttcatcataaaacatatttctactggcaatcttaatgattggttcatccagtagtttccgttctgcaaatatcagatgaatgtgataattggtctttcttttattgtggtgcagagcagcaatacactccgctccgtaattctgtttaaaatgatttgtaaaaagctgtagcaatctatccggctgatattctgtaaaactctctggcaaagcaatgatcagttctcttgcctcaatacattttccttctgttccactttttgcaaattcttcctgattacattttgcaagttcccgccagaatttccgttctgtggtttcataaactgcatagaggttttcctgttttgcatgactggatatataagtgatcctgccttttacattgcttagttttgtcatttgaataaatgaatttcttccgataggcactccctccttgtcttcggcaaaataaattctgccatatcatttgtgagtggatgcatcggcatccgtttacgaactatccgcctgtcggcggaacagctcccggcagggcgaaatatcctgagtacaaatctttaatttgtgcgatgggtgtatttcgctctcaaacgccgagggctttgtgagatgcttcttacatctaccacaacttggctttcgcttttcattttgggcgtattcgccctctttttctgcccgtatccgggcttattttttcactaacaacaaaccgactattactcttcctgtctgctttattccggtatccttgcccgtacatactccagatctccacaatatggtgttccaaccaaataccattctctcgccagattcatttccattcgtgtctttacccactgatcatcaactagaacttccagacattctccgcaatgaaatcccgtatcaatccataagtctgatgataataagccatatctcttgttataactgttgtaacctaatcttccttctctcatggtgtcattctcccttcatttatcatttcctcagggacgccctgaatcagggcccccttttaaaaagttttttcttcgccaatcaactaccagctacaccttacagaccttctctttgtctgctatctacaggtgcgtgccacgctcctgtcataaggtaatcaaacagaatctttaccaacgaaagtcctcatgcattccacacttatccaaatactcttgtcttgccttttcccgttcttcctcagttggtgctgttttaaatgttgtatataactgatgttttaccacactatctaatttttccatcaatgctttttctatctctggctgatattcctcgttcccggcaagatgatactggaacaatgccagcaataaatcttttggtatctgtacctgtgattttctttccatgtttctcctttccgtgacggtcgtgacgatagtgacgatattttcactaccgtcacgctatataaaataccgtcacaaccgtcacatatcgtcacgcttgttttccgacaaaggttaatctaatttttcttccatcgtgtcctcgttctgttttatactggattccatattccagaatcagacgttccaggctgacatttaattttcgtgataatgcgttcggctgcatttccacctgcaatacttccacaagctctgttgctgttcctacccactctggcatagtttctgttacaagttctttgattttttccaacactggatcttctagttctttccaaagttctgtttctgtcttggtaagttcccagacacatctctcccgattaaagttcaaccacagtttctgatcctgctggtcacgccctgccacttccagaactgccttattatctgtccgtttttctttctgcatgacgaatgctccatccgcagctccaagcaatccattcgtgccagaaatcatatcaaaactatcggaagattccattttccttgtatgatgcacaaccagaaaacagatgctatatttatcactgaatgctttcaactttgttacaatctcgtaatcgctggcataactgaatttatctccaccgacttcccggactttctgaagcgtatcaataataatgagccttgcgtccttatgatctgttacaaactgcacaagctgttgttccaatccagcatttaatgatttggactttgtggcaaaataaaagttttcactgccttccattccgaacatctgtgataatcgtttctgcaaccttgcataatcgtcttccaatgccagatacagaaccgttccctgtctgactgaaaagccccacaatggaagtcctttactgatgtgatacccgatctgtgccatgaaaaatgattttccaattttcggtgaaccaacaaacaggtaagttccgttatacagaagtccatctataatcggcaattttggtggatatgcagtatcatataattccatcatggaaactgtttccagatcatcttgattctttttatttgctgattttgctgtattttccgcattatttgtggcttgcagattgcccttaccgggcaaatctgctatactttggttggtttttaaattttctaatggctgttccacatctgcgccaacagatgcaatcggagcagtcattttttcttttgctgtcattcattttcccctttcaatccatacaatgtctctgcgaccaatctcagggtactcaacaactcttcgttttcctcactgcatttttccagatgtttcaattcttcataaatctctgccatctgatttcgcaatgctttatacactcttggatttccctgtatcacaatttcccgatcagttaatcgttttgtgatatagtcctgcttgctaagtcctgacaatcggacacatgcatcaatctgctctgcttcttccggtgatacccggaatgctacgattttgtttctccatcttcctttactgtccagattcttctccatttgatttttccatcctttcaatatccaactgttctgccatctgtgtctgctcacttggaaacagatgcgcatatcggtaagtgatatcaatgctctcatgtcccattcgatctgcgattgccaataccgtaaatcccatattgatcaataacgatacatgggaatgtctcaaatcatgcacacggattcgcttcaccccagacacttttgatcctctgttcatttcatgatgcagataagatttggaaatcgtgaaaatccgttcgtcctctttcggctcatacagcattttcagataatcctgcatctcatcacacaaaaactgcggcatcttaatggttcgattactttttaatgtctttggtggtgtaatcacatcttcccggtgcaacctctggtaggacttgttaatccgtagtgtatgcgtttcaaaattgaaatctaccggtgtaagtgctaataattcgcccatgcgaagcccacaccagtaaagtatttcaaacgcataataggaaacaggcttgtccatcatggcatctgcaaatttcaaatattcttcttttgtccagaacagcatttcccggtgttcctcttttcccatatttcctgctttctgtgccggattagatggaagatggtaaaaattaactgcatggttgaaaatagcacttaactgactatgaattttctgcagataagaggcggaatacggctttccattcggctgccggatcgcaagcaattcattctgccatgcaataatgtcccttggctcaatttctcctattttacgctttccgaaataaggaagaattttagttctggcaatatttgtcttcgttccccaggtattatcacgaattcgattttgcatatcctccacataaatctcataaaagctttcgaaagtcatatccaatttggcttctttcttcagcaatagctctcgttcccacatctgcgcttctcgttttgtaggaaatcctcttttggatgactggtgcgtttctcctgtccaatcggtataacgatagactactcgccactttccagtggcattatctttatgaatactcatacaaattctcctctctttctcttacatttcgctgtaacatacttttttgcggaaataattggtgtttactctgccagctaccgtaagataacccagcttctgtaattcttcatttagctgtttgataatcttataagcataagacttggaaactcccatttccgctgcaacttcttctactgtcataaaagttctgttcgtcacatcgcatctctcctttcattcttaacgcaatttgtttaggttgctacatttgcatgatactaaacatttttatttaagtcaagtagtttggtgagaatattaaatttttttgtttaagttcttcttgctatccaaaattgctcatgctatactgaacctaaacagaattgttttattttctatcacgattaattatggcaacacgaatgaccactataaggaggcaaacaaaaatggcaatcggacaacgtatcaaattttttcgcaaccgcaaaggcatgacacaaaagcaacttggagaacaactgggattcatgggaaaaacctctgatgtccgcatggctcaatatgaatctgaagctagagttccgaaaattgatcttgtaaaacaaatgtctcagatcttcgatgtcaatactcatgctttaacagtgccggatattgatactcacataggtctgatgcatacactatttgcactggaagatatatatggtctaaaggtaaaaaatgtagatggacaacctcatctctgccttgactcttccatatctgctcccggctcatctgtcgatgaaatgcttcgtgcatggatggaacaatctgacaaattggaaaacggtgaaatcagcaaggaagaatatgatgaatggagatataagtacccggaactggatacttaccagaaacgtgccaagataccctctcaggaactgagtgattacctcttaaaagaattgactaaaaaagaaaattaagaaaaaaagaaaaccttaccgatattcagttttttacttctgaaaatcagtaaggtttctttatatacgttatgaaataaaatttctatctcttgaataatcacaaaatgttgccattttgttgccaattactaaacaaatttgttttcaaccctcataaatactggattcttatgattgtgtggattattcaaactcaatcgttcccggtggcttactcgtcagatcatagaatattctattcaccccgcgaacttcatttataactctgctcatcaccttattcagaacttcatacggaatctccgctgcctctgcagtcatgaaatcaatcgtattaacagctctaagagctacagcataatcataagttctctcatcacccataacaccaacgcttctcatattcgtaagtgctgcaaaatactgaccaattgtcttatcaagtccggcattttcaatctcttcacgataaatagcatctgcatcctgaacgatacgaactttctcagctgttacttcgccgatgatacgtactccaagtcccggtcctgggaatggctgacggaatacgagtctttcaggaagtccgagctcaagtcctgctttacgaacttcatctttgaaaagatcacgaagcggctcaatgatttctttgaaatctacaaaatccggaagtcctcctacattatgatgagatttgatcactgcggattctccgccaagaccactttctacaacatccggataaatggttccctgtgcaaggaattcaacagtaccgatcttctttgcttcttcttcgaagatacggatgaattcttcaccgatgatcttacgttttgcttctggctctgtaacgcctgcaagtttgttataatatctttcctgtgcatttacgcggataaagttcagatcgaactgtccttctggtccgaagattgcttcaacttcatcaccttcatttttacgaagaagaccatgatctacgaatacacaagtaagctgttttccaatagctttggaaagaaggcctgctgccactgaagagtcaaccccacctgacagtgcgagcaatactctcccgtctccaaccttctcgcggatctctgcgattgtattctcaacaaaggcatccatcttccagtcacctgcacattcacatacattttttacaaagttgttgatcatctttgttccttctactgtatgaagtacttctggatggaactggattgcatacaatttctcagctgtgttctcagctgctgcaaccggacagtcagcagtgtgtgctgtaatttcaaatcccggagcaatttttgaaatataatcaaaatggctcatccaacatgttgttgtctctgaaacaccctcaaatactttggagtcttttttatcaataataacttctgtcttgccgtattctcttacatctgcacgctcaacttttccgccaagtacatgagacatcagctgtgcgccatagcaaagtccgagaaccggaattccaagcttgaacagttcttctgaataagtcggtgaatccggctcataacagctgtttggtccgcctgtgagaatgattccttttggattcatctctttaattttttcaatatctgtcttataagaataaatttcacaatatacattacactccctgacacgtcttgcgactagctggttatactgtccaccgaagtcaaggacaatcactaattctttcttcaaatctttcctcctgtcaaatccaatcaaaactatttgctttatccatatatttttttctgttcttcattatagtagaggaatccttgatttacaagtatttgtttatgtaaaataaaatcttatccacaatttctattactatacacggtaattattccccttctgatctatccagaacaaaaaagatgccgaacaaatgcccgacatcccatttttatgttccattttatgctacaaatctttctagctgtctttcaagttctgtgcaatcgtctgcatacatctgcagttcaatcacgttattcaatcccagattcatgattccaagtaatgacttcgcatctactactgcccgtcctcttctcatgtccatgttaaagtcaaatttacatactgtgttcaagaaatcaatgatctcatccgggtgtttgaaagtaatgttcattgtactcattcttttcacctctttctgccttaacggctatgaaatccttttcatttttcatttgtatcatagcacattttttatattttaaagggtgaaattttttataaaggtgtatttttttaattaaatatgcccattattctctactttttcctataaacagcatgaaattactcttgattatgaaatcccagtggagttacgtctgtattccgtcggtaaaatcccttcctcctctttaaacaccttactcatatatttgggatcagagtaaccgacaagccccgcaatctgattcatcttatattttgttgtcctaagaagctcctttattttttctatcctgtatttcctcacagtttctgtaaaattatatcctgtctccttcttaaactgggaactcagatattcttctgatacataaagctggctcgctgcttcttccaatgtaatacctctgtcatattcttttcttacaatttccattgctttttgaataagcgtactgtaccgctcaaatttatgttcatatgatagcatccgttccaatccttgaatcgctttctctatctgtttccagctgatggcatatgtaatctgctgcataagactcaggatttctgtttcgtcaatctccccgccataatttctataatttaatccagctgccatgcaaaaacgaatgatactgtattttatttcttttggaaaatatttttctcttttcatttcctcacaaacaagttgaaattgtctggcaattcctttcttgttttcatcgaaaatcatttcccgcattcgttgttctaattctaccggataacgcaccggaacaacttcaaatttctcaactgtctgctgacagatcaaaactcctcgtggctgaagaagattccattccataaggctccctgtctgaatcattgcctcttccagctttgtcagctgttttgtctctatccatacacaaataattgtccccggaaacttcctacataacccagtaaccacatttttttgaaaatattctttccagttcctagcttcatatacccggtaaatgatcaggtacacctttttccattgatccgaacatataacagatgccgaaaatccacactcatgtctacagatttcttcgagaaatccacgtacattctccttctgctcctcgtattcgtctgccattgaaaccgtaaataaatatcccggatcatccactgtaaaaccaaatctccggatggtcatttcatttaacttctgattcgatataatttctccatctctgcagctcaacagaacattttcaacagtaaaagaagcctgcatccaatactcattcctgattttttcatgaatacggcttaatgccttcttaagctccatcggctgaaacggctgtactaaatatccgtccacccccagatcgattgcctgctttgcctgttgaaaatcttcatcctttgttataataatcacacgaaactcgcgcccttctgtgcgtaattttctcaaaagatttaatccattcatccgtggaagcccaatgtccataataacaaggtttggctgcataactgttatcatctcatatgcagactgtccgttccctgcaatccccgccaattcgtaattcggatctacgcgtttcaaaccttttttcagttcttctaatactttttcatccctttcaatgattgccacccgcatttgaacagtctcctctcaatgtccgtgtttccgattggatatcctcttttattgtaacattaacttcaataattggaagtatgcaagtgtaaatatttttctctggtggcgagccctccccggatgtgacgttctgatttgttggtgtctaaaaccttacgcgtttcatgagccaatgatgggttgatctgaagcagacgttctgtaacatccttatgcaccgtactcttactaatccgaaactgtttcgctgtctgtctcactgtcgcattattttctataatataatttgcaatttctactgcacgctcctcaatatattctctcatagaaaagcccctgcatagtttgttttttacaatctatgcaggggcaaatcaatgtatgtctaattcctgttccatctattcgtagaaaatatcataccatacaacttaatactcaaatactgccacaccatatcccggaagaggatatgcaaaggaatatttctgaccatcacattcctgtttctctggcttgtaaaccaattggcgttcctctcctgatccgccgtattttgtctcatcactgttaagaacaagcttaaactgctttcttctcggaacaccaacacagtaatccggtctgtctaccggtgtaaagttgcatacaaaaagcagattcttcttcccatcctttgaatgtcttgtgaaactgaaaatactccggaagatatcatccttattgatccagtcaaatcccttcggatcattatccaactcatacaatgccttattcttcttataaagatgaagcaaatctttataccagttctgaatctgctgatgtggttcttctgcaagaaggaaccaatccagttctctctcttcactccactcacgaagctgtgcgaactcctgtcccataaagagaagcttctttccaggatgtcccatcataaatgcatatgccaccttcaagttgcggaacttatcccatccttctcccggcatcttattcaacatggagcatttcagatgaacaacctcatcatgagaaagtacaagaatatagttctctgaatatgcatattccatagaaaatgtcatcatatgatgtgcattctttctgaaataaggatccagtttcatgtattctgtaaagtcatgcatccaacccatattccacttcaaagtaaatccaagtccatcatcctcaggagatcctgtcaccttcggccatgctgtagactcttctgcgatcatcataacgcctttatttcttccgcaaactacagaattcagatgtttaaagaatgcaatcgcctcaagattctcatttccgccaaatttattcggaatccactgtccatcttctcttccgtagtccagatacagcatagatgccactgcatctacacgaagtccgtctacatgataatgttcaacccagaacaatgcattcgtcaaaaggaagttagaaacttccggtttttcataattgaaaaccttcgttccccaatcaggatgctcgccctttctcggatctggatattcgaatgtcggtgttccgtcaaaatctgccagaccatgtgcatctttcgggaaatgcgccggtacccagtcaagaataacaccgatattattcttatgaagataatttaccatatatgcaaaatcttccggtgttccatagcgtgaagttggtgcataatatccggttacctgatatccccaggaaccgtcaaatggatgctctgcgattcccatcaactcaacatgagtatatcccatctcttttacatactttgtaattgcttctgcaaactcacgatatgtataaaatccttcatcttctcttccaggatgtctcatccaggaacccatatgtacttcataaatagacactggttcttctttgttatcccatttctcacgagcagtcatccacttactgtctgaccagttcagattagaaatatctgtgattctggaagctgttcccggccggagctctgcataattagcaaatggatctgctttgtaaatcttctcacccgcctgtgtctctatacagaacttatacaaatcccctttcttcgcctccggaacgaagcatgtatatattccgagaggctcccctctcttcatcttatctttcgtctcatcccagtcattaaactctccgattacagaaacgtttactgcatgaggagcccataccgcaaaatatactcctctttttccgttctttgtcacctcatgggcacccatctttttataaatctcataatgatttccctgcccaaaaagataatggtcaagttctccgatctcataaggctgcactttcgtcttcgtgctgtttttcttaaccataaagccacctcactgctcaaatatattcctgattgtaatgatttaaaaaccatacaatttcttatagatcaaggcacattaccgaatctttcaattggtaacaaagtttcattctacccttgaacactatagttttattatacttgatactgtataaaaaagaaagagaaaatgtattattgcacaaaaatagacagtcgttttactgactgtctattaattcttaacaaatatatgtcattaaatgttgaaatctttctctgaaagcagaattctgtcggaagaatctgtattctttccaaatactctcttcacaagcttctttgcggaagctttctgtgaatgagcgattgcatcatccatcacttctttcacttctgctactgtcactgcatgatcttctcgctgtaaagaatcaatcttactgtacagtgcaagaattcccatctcatcgattctgtaaccattctcctgagcataagtctgtccaaatgttacaagctcatcattgataaagatcggcacttcaagtctggaagtaaattttcttctgaattctctgttggaagaaagaagtctgtccagtggttttctctgctcttcaagaactaccagaagttctcctgtatcctgctccattgctttgttcagcttggcgagtgttttttcgttcatctgtccggctttttcaatgatcagtgcaccgccgtacagtttacggaaaatgtctccgattctcttcttattcagtgactcacctgtcacaattgcaaccttcccctgacgaatatcacgctgcttctggattgcctttacaacatcaacagcaaggactgtctttccatttcctttatttccaatgatcagaaggtttcctgttccggaagttcctttgcggtttgtacagttcttatcctgctcaagtacatctaccagctgctcactcataccacgcacaggtacaaaataagagaagagttttttctgttcctctgtaagccctgctcttgtaccgattccactctgtgtttcaagatcatagcgaccatgtacgataaatcctgtatcagacattgcatctgcaatctcatctaacggtaatggtgatgtcttacctgttgcgatcaattttgcagtctctttacggctcaatggtgtcgtcgcagacatgatatcaattccgccatcttcatccgggatctctctgtcatccggctcctcactatgcgctggattcacgctgaattcatcttcaaaatttggcacttcttcataagaattcagaccaagaagatcatcatctgaaaccttatcttctgctgtgaaaagatctcttggattgattacttcatcatcctcatcgtcttcttcataaccataggcatccagatcatcatatccttcttcctcactgaacagatcatcatcagcgtcctcataatcatccggcagatcgtcatcagactcttcataatcatccaacaaatcgtcatcagactcttcataatcatctaaaatatcgtcttcgtcaaactcttctgcatcatcccagtcatacgcatcataatcttcgtactcatcctcaccgagtctgagatcatccgcaagctctcccatattttcatgtggttcttcttctacttcaagaacttcttctgaacttactgttgtatctacttcttcctcttccggaataacaccttcaatctcatcaatcagtttctgtatctctggtgataaaatcggttcttcattatttttattgtccatagtctctcttactgctgctccttctgaatcatcttcatcattgacaacttcagtttctgagatcagttcccccacctcagacaaatcttctgattcatctgtcagatcttctgactcagcttcatctatttcaaggatttcttcctcttccggttctgcttcccctgcttcaagaatttcttcctcttccggttctgcttcttctacttcaagaacttcttcctcttccggttctgcctcttctacttcaagaacttcttccggttctgcttcccctgcttctatagcaactgcatcttctgggacatcttctgaagtctcctccactgcctgttctataagctcttcttctgtctccggttccggtatcagttctttcatccctgatggaactactcgttctttactggcttcctcagctttcttctcttctgtcagttgattcacgatctcaagatcttctacatcctcaattgctgcaatatcctcttccagatctgtcatatccggttcgacttcttctcccggttctgcctgaacttccggtttcgggttgagtaattgctgcagagcttcatctaaccgcatcgtatctccaagtttcttcttgactggttttaccggattcttactgacaatcggtatggaagctgtatctttgctaagtgttctcttatctccacttgtctctaccgttgccggctgaacttctgactcatcctcggaagattctataacttctgctgtttctactcctgcttcttccggattttctacttcggcatccggctcttctgtcgtttccaaagtaaccgcatccgtgtcaatcacatcggaagtactgtcgttctccatcaccggctgctctgtcagcccgattgatcttgtatctccaagtgcctcggctccttctgatgcagaatctttttcctcgtcttcttctaaataggaagccagatccggtatttcttctgtctcggaagaaagcttctcatatctgtgatcatatttctgctgctgcgatggtgacaatggcttatactgcatcttcagttccattgccttataaacatacttaccctcgctgaaccagaggatcagatcatcacactcttccagacattctgtcatcatacctgcttcgcgataaagcttcgccagttcataagcccactcttcaatatattctgccttcttaaattcctccagagcctcaatctgctgttcgatcggtgctctctgcgctcttaagatctgatatctaaggatatgcctgttcggatctttcggtgcaatctggataaattcgtcataatagtcaattgcttcatctatattctttgtcttaattgcaagagaacataacttatagattaccttgcggcttccttcggaacggcgatatgcaagattcatcacatcgtagctcttctgatactcttttgttttctcataaatatcactgacattcatcagcatccctgcgttacggacacgcttccagtcaatcagatctgctgctgccgctgcttttctgtattctccatcttccataagttccagcatctcttctgtctttaacttatattcatacttatccactgtactcacctcattgtcattgaaatattagttttggtctgaatgtgtccattaggcactagccgatactctttcattattctaccatatgaggtctgtaatgtcaaaaaaatgcaccttcaattccttttgaaagtgcatttttagtgttatttaattgtattattattataattttatattttgtatcggagattattctcgattctacgttcctgtgagacctttgtcgtctgttattttatcacctgaatgattttcatatccattcaatactttatgtattaaatcttctgtcaagtcattcctgcttttataacaaatctgagattataacatgtcctttcaatgtttctttacacatttttcattctatgttatatgcggtatttttattcaatacatctatgagtgattcatctttttctctttgcttccagtttccgtactctccgatctttgatcttcttttctttctactggacttttacgcttggcaaaggtctctttcttcacaggaaccttcactcatcataccactgacatattgataaaaatctgaaactatactgtccatgggactgacctcctgttgaacttgtatttttaatctaatcaggcatctgttacttttgccttcttagttaaatatctttgggagatttctttctctctttgatggttatataataacattcggcgtctaatttgtcaatatattcatttgatttttttatattttttatttattatctgctttggttgtaattgtctgaattttcaaacatttcaattaacagatttctgctccagccggcatttctttttccggtgtcatcagtgcaaggttaccttctgcatcttctgcacaaagcaacattccctctgaaagtacgcctgccagcttcgcaggtttcaggtttacaagaaccataactttcttaccaaccatttcttccggtgtgtaatgcgctttgattccggatacgatctgttttacctggcttccaacttttacctgagagcagagaagctttttggatttctttacagcctcacatgcaatgatctctccaacctggaactgcattgctccgaactgctcaaatgtgatctcatctttctgctcaatgtcgatcacagcttcttcctcttccttttcttctaccttcggatgaagttcttctacttttttcataacttcctcaagatccattctctggaacaggatctccggcttctctgttacatgtccgttaccaagctgctcaaggatcttcttacttgtagaaggcataaaagattcaagaagtcttgcaccttcagaaatgctctggatcagattccaaagtactgtagaaaggcgatccttcttggattcatcttttccgagtacccaaggagttgtctcatcaatatatttattgcagcgtttgaacagattgaagatttctgtaatcgcatcggcaacgcggaggtctgccatcttagcatcaactgctttagaagcattctctacaactgctttcagttctgcatctacatcttctacaacacccttatcttctactgttccgccgaagtatttgtttgtcatggaaacagttctgtttacaaggtttccaagtgtattggcaaggtcggagttcaaacgctctaccatcagttcccaggaaataacaccgtcattctcgaatggcatttcatgcagtacaaagtaacgaactgcatctacaccgaagaaatcaacgagtttatctgcatagagaacatttcccttggatttgctcatcttaccgtctccctgaagcagccaaggatgtccgaatacctgtttcggaagtggaagatcaagtgccataaggaagattggccagtaaattgtatggaaacggatgatatcttttccgatcagatgaagatctgccggccaaagcttgccaaactgctctgtgctgtttccgtctgcatcatatccgattcctgtgatatagtttgtaagagcatcaagccatacgtatacaacgtgctttggatcgaaatctaccggaattccccacttgaaagatgttctggatacacacagatcctgaagtcccggaagaaggaagttgttcatcatctcgttcttacgggcaaccggctgaatgaactccggatgtgtattgatatgctcgatcaggcggtcagcatacttgctcattttgaagaaatatgcctcttcttttgcaggctgaaccgggcgtccacagtcaggacattttccatctacaagctgagactctgtgaagaaagactcacacggtgtacagtacattccttcataatgtcccttgtaaatatctcccttgtcgtaaagtttcttgaaaatcttcttaacctgtttctcatgatcttcatctgttgtacggatgaatttgtcataagatgtatccatcagatcccagattcttttgatttctgttgatacattatctacgaattcctttggtgtgattccagcctcctcggctttgagctcgatcttctgtccgtgctcatctgttcctgtctggaagaatacatcatatccctggcttctcttgtaacgtgcgattgcatctgcaagcacgatctcgtatgtgtttccgatatgcggtttacctgatgtataggcaatcgctgttgttatataatattttggtttttctgacatttttctgcctccttttcccgcagtgcgcatcctaagcggagcgtttttatatattaggatagaactttcctaatatataaaaaacgccttcccagggacttgcatccctgagaagacgaatcataccttcgtgttaccacttctcttcgttccttcctcgcggaaagaaacctctaggagtatctgcatttttgttagtaaaaactgctttgttgatcaaaatctctttgaacactacggcatttcccactgttgatactcttcgctataaagggcgaatcccttcacagactaacccggatctttttattcaagattgccgcttaaacaactcacttgctcactctgttcaggctcatctgcgctgctcagaagccatcttcatctgtcttccatccatccctctcaacatccggcctgacagccttcaggacttttctgtagaatctgttacagactactctcttcctcatcgcgtttcgcttatcactgcttttcattccttaaaaaggttagcataacgcgaatagaatgtcaagatacaccgcttgatgatttctttttcgattcctctgttgccccggcagcatttccttttgctttcactcttgaaaatgtaatatctacccggaacaaatctccgtccagatacagatcaaatgtgccgccctgcatcgttgtaaggctcttcgcaatggaaagtcccaatccacttccctccgtacttctggaaatatccccgcgaataaaacgttctgtcagttcttcagcctgaatattcaactgatgctcggaaacatttttcaatgaaaatttcacctttgtatcatctgttttcagagtcgcatagactcttgttccaggcattgcgtacttggctgcatttccgtaaatattttccaggacacgccacattcttcttccatcgacatgcacaacagccggttctgccggaagatctgtgacgatcgccagatttctcacctcgaatttttcttcgagttcgccctgcgtctgctggatcatttccgacagatcaagatccatatattccagcgaaatatttccgctgctgactttcgatgcttctactacatcttctgtcaatgtcttcagtctctgagctttctcttccagaatattcagataatcctgaactttcggatccgccggatctgtctgtcttaagatgccgacataattcaaaatggacgtcagtggtgtcttaatatcatgagaaacatttgtgatcaaatctgtcttgagacgttcgtttttcattgcctcagcaactgctttattaagtccggttccgattccgttgatcatcaatgcaatggttttattctctccatgcagtccgtcaattggaatctgataactcatatttccggcagcaatctcctggattccttttctcagtcggttcttctccatcacatctgcaaccatgtaatagaatagcactgcgtcagcgatcagcagcagaagcaccaggaagaaatctctatccaaaagtacgaaaagctgaaacaggaaataaagaatcaaaagtcctgctgttttctttgtaagcttcacatctcggaatacttttccaagaaatactcccacgcttcgaagcagactgttctcccacagactctttgctttaattcttcttaccagactgaggtaaccggcaaagaaacaagtaaatgtgaacactccataggaaaatacacccactgattctccgagacttaaagtctgcatatatacatttggaacataagatgacggaataaatgtatcactttccacagccccataggaactacacaaccctgtaattccatcaaataagatatgaattccatcgattcctgctacgaaaaagaaataacttccaatcacccagacaaaaataataactgcagcggcaatctctgtcttccaggaatcaaactttaacaaatacagttcttcatcctgcggttttcttcctgcccccaatgtcagccacactactgtgatcaaaaagagtagtccgctgaaaatcataaaatgcaatgctgctttcatatgcggaatattattctgatactcaatactgttctggtaaaattgatcctgaatcggatattttgtatcaaccgcaactgcaaaaacatctttccactttgttcctccggaataataaccataagaacgaatattaagccattgatcagaataagatacattcatattcgtcttaaaatctttcaactccggatagatcaccatgtatttcacagattttttagacgcagaagctattatattctctatgctatctcttacatccgcataatttgcatattctgctttatttgtagtaactttcttcgtcgattcatctgcgtacagataggtaaaattggtatttccctcttccagataatcccaaccgccttcataatcctgccagtcttcatagattgtttgcaatgctgtggctatattatcgtaaaccagcgacaatcttccatttaactgtggattgttatttacaacctgaagcagattatctgcctcaaccggtgcgtatttctctatcagagactggccaaaattccagcagtctgtataaagcagatcaccattttcatctgtaatctgaaatgtataatatccggaagttgtaaattcacctgcctgcaatcctgccaggaactgatctctgtcctgttcgcccatctgaaattgaagttttcctgcatttacaagagagaagaaatcattcatataatagtagtaataatttccgtctggcttttggcagacgatcacgccattctgtttgtaaagattgtcgttatctgtcccactgtaagtttcgccccagttcaccagctcttccattgtgtacgtgacgccggacagattcgtctcagatatctttcccttcttcgacagttccattacatccaccagttttttcggattgtaggcgccatcactttcaaaaagattctgcagataaagcttctcctgtacatcgtacatgtaactttcgaccatcttgctgaattcttcggattcttcaaaagactgtgtattcatcttttggatctgtgacaaactcattccccccgccagtgtcaggagaaaaagcaaatttgttacaagcaatgctccgctaagaatcgccacaacaagaacgattgtccttgtcacggtcttcctgtaccatttcttcattgttaaccctttcttatgctttttcgattttatatccgacaccccagactactttcaggtaacgtggatctttcggattgatctctattttttctctgatatgacgaatgtgaactgcaactgtgttatccgcaccaattgcctcttcattccagatggattcataaatctgattgattgaaaatacttttccctgattcttcatcagaagcaaaaggatattgtattcaatcggtgtcagtttcacaaattctccgtctactgttacctgcttgagatcatcattgatctgaaggccacccaccttataaatcgtctcttttggctcctgtgctgttccgccaagctcgttaaatcttctcagctgtgatttcactcgtgccacaagttccagcggattgaacggctttgtcacataatcatccgcaccgatattgagtccaagaatcttatcggtatcttctgacttcgcagacaaaataatgattggcagactgttcttctcgcggatcttcaatgtcgctcggattccgtcaagtcttggcatcatgacatcgatgatcagaagattcacttcctctttctccagaatctccagtgcctcgattccgtcatatgcttttaagatctgatatccctcctgggaaagataaatttcgattgcttctacgatttctctatcgtcatcacatactaatattttatacattttacatacccctcgataattgctgacaccgataacagcgcagcaacataattatcacatgatcaagttctaactatagtatacatgatacttgatggtttttaagagatagattggaaaaatattaggaatttcttaaatcgacgatttaacaatttaaatactttctatttcttgcacatcttttgccaacgttttataataagaaaccgtgagccactttagaacataagtgtagctgcacaaaaatgattgcatttagtactagaatctcttagtatagctgcaatccatcaataaaaaggagtataaattaagaatgattgaatttttaaaatccttcctctttggaattgtggaaggaatcacagaatggctgccgatcagcagcaccggacatctgatccttttgaatcagtttgtgaaattagatgtttccgaagaattctacagtatgtttgaagttgtgatccagttaggtgcgattcttgccgttgtcatcttattctggaaccagatcttcccgtttggtgcaccggaaggaagtcacacggtcagacgccgtcaggcaaaacatgcgcatagaaaaaagaaatccggaaatggaattttaagttatgtgaagatggatatcattatcctctggctgaaagtccttgttgcatgtatccctgcgatcgtgatcggaatgccgttcaatgatctgtttgagaaatggttttacaattacccttgcgttgcgattgctctgattgtcttcggtatcgcctttatcattgttgagaataatcacaagggcaaacctgcgaagatcaacagtatggacgaacttacttataagactgcatctctgattggacttttccaactgatcgctgcaatcttccctggaacatctagatccggtgcaacaattgtcggtgctttgatccttggagtatccagaaccgttgctgctgaattcactttcgtacttgcgattccggttatgttcggtgcaagtcttctgaagcttgtgaagtttggcctgaactttaccggaacagaagcggctattctgctgatcggaatggtaacagcatttgtttcttctattatcgttattcaattcctgatgggatatattaagaaacatgatttcaaagtatttggatattacagaattgtgcttggtattcttgtgatactgtatgcgttgtttttagcgtagtttgaaaaagacgggtaatgatgagttccattcaccattcccgtcttttttaacttactttcactagaggtccgtttccttttacttaatatcttcctctattatacattcatgtttcttcgtttttttattgtaatttactcctacaagaagtatgtttcctttgtattcctctaaacttttacaatattctttcttcttaatctgttcaattgcaccgtttgcgctttcattccatttaagttctaccacaagtgcaggtttttcctggaatttttttctaggaagaaatacaagatctgcaaacccttgtcctcccgccaattctctgtgaacagtgtaaaagtttcttgcagcatataacgcaagtgatatcgtataactcaatgcattttcatcgttatattgcaaatgagatgtctcaaaatgtgcttgtcttattccctctgccacttgtacaggacgtttctgccaaatagcattcaatgtatctgccgaatttttcaatgctttagaaacttcaccccaatccgacacggaaacactgctgacgtattctgctctcacctcattatttggtattttcactgttttattatcatagtcatatgccagatacccaagatggattaataaagtaagtacatcatcctctgtatgaaatgttgccatatcatttgtaaaacttcctgtattcactggaacactttccccggcgatcatgcttaacacgtcatctcgcaatccttcaaaattcatatcaatatacatttttaaagcttcaaacgtttctgtctgattccagtaatttccaaatttcccaaatcgcatgcagcttactactgaacgtggactataaatagaaggtgctccttcaaaagaatatccgtcataccagctttttagctcctgcatgtccatgccatatcgttcacacagctcgcttacttcttcttctgtaaatccgacatattccgccaatggtcccggatcaatcatggaaaattcatcaaacatattcaacgctgaatgtgtgccatatttttttattggaagaattcctgtcatataagcaagtgcgacatatcctttgtctttcaataaatctcttagaaaatccaaatatttttcctgcgcttttttatctgttatatactctctgaaaatgcagtcccattcatcaataattacaacaaacggtctctttgtcttattataaatatcctgaagagttctcattaaatttgtttcatcaaagtatcggaaatccgggtatttgtctaacaagtcccatattacgctctttttaagcaagctaagcatttcctccacattggagctttgactcaggaattcttgcatattaagaaaaatcacatcatatttattcaaatgcttttcataactatctgatgatgctatttttaaatttgagaacagctcccttgaatcatactcacacgtatagtaggcagaaagcatattggcagcaatagactttccaaaacgacgtggacgactgatgcaaatataactttgtaatgttttagcacttctatttgtatattcaatcaatcccgtcttatcaacatatatttctgaatttacaactcttgcaaaagtactaatatccgggttcaaagaatttcccatttaatttttacctccatacagttctctttctggcaattatttttggacactcatgttattattatacgacataaaagaaagacgggcaatgttttccacacccgtcttcctagcaaccgtataaaaatatccatttagcctacctacatctcattggcataataatcgcaaaaccataatgtcttgccgcgtttgatttcaaacgaatttacataagctccttttctagtattttcaactctgtaaactcccggaaatattaattcacacgttgtatttttgtcaccatcatatacaattcgagtaattgacattttctcccaacttctgagatttataaaataaaagttatcgaaatctgaattacttgattctcgtctaaaagggaaattattgtactcatccaacatgtgcatttcaaagctgtctgctctactaccaaattcaatccagccatcagccagcattattggtggtgtaaaatagagtattaaaactatacacaataaaataacaatacttataatgttctttttataatacttcttcacacgctcacccccttttttcctggcacccacattatgccataaaaaagaagcctgtgcgaaaacatgtaatcaactgcggatttctcgtagtcaaatgcatcagtttcttttcagacttcttatttttgctttatttaatttttctgtggcagataaattataaaatccaccctgaattcccagtttgcataatctatttccatataaattttatatctgatttttgattatccgcataaacactatactttcaaacattttgaagtatagaaaactattcattttaccacgaatttaccacgattgaatgagccttgatatgacacaaaaacaacatgggagatagcacaaatatctgtgtatctcccgtttttcattcatgtagtatgattattttactctgatttcaaatttcaagattgctttcatcatttctgtatggatttgaccttttaattcttcatcaacctgcataatgattttaccactttcagagtggtaaaacggacgcaagcataatttacatatataagcgtcataaaacttcaaaatctctcttatggcagtttcatttccagcagacgcttgacatattacttttaatgtagggtagccatattcttttttcattggttcaattcctttctttcaatactgtttttagtttcttcaatccgttacttcttctgcgataaatagcagaacgtgatacatgatataattcggctatttcttggtcgctcatactttgaaaatagcgtaatagaattacatcacgctctttattcgataacttatataaagcaacagcaagtttctcatttgatatttgaattgtaaaattcaagacttcaaacgaaatgtaatcacaagaatagttatccttagttacacattcaacatttttcgtatctgataattcacagaataaaacttcacgcttagaacgtcttgcaaactgtctgtttctgttttttactgtgcatttaataacagtcatcatcaaagcattaaactgtattctaacgatatgctcgaaagaagatgggttcataatctcacctcctttccgcatacgctgaaatatataaacggagataccgtctatatctttggaaaatacaaaaagaagaacaagaaaaaagtccgtacaaaatataccgtctgtacgaacttttaatattgtaaaatatttagttgttgataaaatgctgttaggtagtgcataatcgtataagattattcctaaaactttccacagcagttactttcaatgcttttatatcttgcttttttagtcctatcataataacctttcttatcataattgcaaatttataaattcattagtattaaaactgaaattcaaatacattactaaaatcattgttcaagacataataaactttatttttttctgtagaatatacaaatgaaaccctagttgcccacaagtctttttgagaaacagattttaatactttaaatgcgtcatttactgaaaaatctttatcatatcctgccaataactctttagccacttcgtatcttgtatccccagaaacaatgtacggctttgttatatctggttttagaatagaataatttgtaataagtgaaaaattttcttgttcatatctatacccaattccgggttcaataattaaaactcgtccttttttatcagaaagcatagcttgcatagtagcatctggtgcataaataatttttttctttttaacaatgtccaaggctttatcaaaagaaatctctgccttaatgaatttttctgttaattcagatattgtaatacaatcctcgctttctatataccttgcattttcattaccatgaacataaagaagtgttcctacattaccatttttatttatcccatgaaatgaatgatacataccgtcaggcattttaataccaatataaaatctattttcttcggtaattacagtatgatcccatacagaaaggtcaatatcaaaattaaaaccaacaattttatctataccattgtaaacaaatcttgtacacatataatcactcctcaaaatactacttcaaatagttatttaactaattcaattagtattttaaaatgtttttgtaggaaagtcaataaataatcataattttctaattgtgttattgactacactaattcaattagctagaattgtgtttgtatgatattttgaatgaggtgcataactatgaaaaccactaaagaagcagtaataaaagcaacatcagacttagcagatgaaaaaggattaaataacgtttcgttaaaagctgttgctcaaaaattaaacattcgtacaccatctttatataatcacatagaaagtttagataatcttcttttagaagttgctcataatggtatgcgtgacatgaatgaaagaatgatgaaaattgccgttggaaaaatagggaaagaagcaattaagttagtttctatcgaatacctaaactatatgattgaacaccccggagtttatgaaacaattcaatgggctgtgtggcacggaacagaggaaacagcaaccatttttaacaactatctttcattattaactactcttatccaatcgtgcagtcttaacaaagacaaaacacttgaaatattaaatatgcttactggaataattcacggttatacaactttgcaattaggaaacgctttttctgcctcagataaagttagatttgaattagctgaagcgatagatactttattagtcgggattttccagaagtataaataatatatttaggcttgcaaatcaatacagaactgcaagcctttttcttttatccaacaatcttccagttactattccttatatagcccaaacttgtaccgtgacaatttcattgatattatccgatttaccacaaatcaaattttatcttttcttcctcttgattaccctccacagaaaagaaaaagccctgtcaagagccttgccaccattggtggtgctttgcactctttactgggctttttgtttgctgtatcttctacaaagaggaaaaaagttattcgtcctcatcatcaaaatggttatttttcaatacttcccgtaataattccatatcttcttttgaattggggtttatcatttttacgacttgataaggtgtcctatatttatgtccctctatgctttccccgaacatatccatgctgtataaatcatcatagcggtctaacagtttttgaaacttcaaatgctggataaattctttgattggataaaggtcggacgctacaatacttttcccgttgatgtagtcggtaatatattcccgtaacttttccaactcatattccagccattcttcctcgctgtcaaagaagttgtcataatgtccatgttttagttctgcatttaatcgttcttcaattcttaaaaactggcagacttccttttcggattgattaacatacttccattctcccgataataattcattgggcattacacccagcacgtccattatcttttctaatgtatcaaaggtaggaaaattcacacctcgttcaatcttggaaaggctctgcatattgataccgattttatccgcaagttcctgttgtttcattcctctgtgttttcttatggtctgtatgttttctcctaagaaactgattttcttttcataatgctccataacttagtataaccgctcctttcgttgcttttcttggtatttataagcatatcatacttaatctacatctaaaagtcaacaaaaacttcttgacaagtaattctaatggcgttattatcgtatcagatagagtgattaagcacgatagggtcaatcacacgcttgagtaagcatagagaagatacattttcactttgatagcatgaataagcatggactatcagaccgaaaatagtggtttccaaaaggggctggctggacggggcacgtcccccagacgtgttcggacagacagttccttttggaaaaggaacgcctaaaggcgttcgcagagggcgtatatgtaacaccgccctgcgcatacatgtcatagtacctagaaactgtgataaataaaggaaaaaacacaatttttaccccgcaaaaaacgggacatacgaaaggagtaatgcactataactacacacaaaaatttatccgttaagattgattacatcagcattgtatttgaaacggcaactgctgaagatgtcatcatgcacattttaggtttaccgactgacattttcaatgtctatccggcaagcattaaatacaaaacctatcaagcacgctggcagattggagatatttatgtatcgggcgacgcaagaaaaacagaggataacccacaagggttaggctgttatcttgttatgaccggcagagggtgtgatgatattttccgtattctcgacagtaggaattgtacttttggggatatgttcaaacattgtgagcgaagatacggacaggataacttccacttcacaaggcttgatattgccattgatgataaaaacgaaaagccattttttaccatagagcagataaagaagaaatgcgaaaaagaggaatttatctcgaatagtgagggctaccactttgacgaaagcaagtttgatgatttcgacaccgcaaagactgtttatatcggtgctggtaaatcgggattgtcctaccgcttttatgataaggataaggaagtctgttcaaaacataataagacgcttgaggaagtcggcagttggaaacggacagaaatgcaactgcgtgatgataaggctcatgcttttgccatgacattcaaggaaagaccgctggaacttggagaactggctttcggtctattggcaaacaacctacgctttgtcgtaccaaacagaaacgaaagtaataagagcagatggaaaacttgtcggttttgggaacgctttttaggggctgtggaagtcttaaaactgcaagtaccaaaacagcaaaattcccttgaagaaacacagcaatggctcacagagggtggcgtgatttccgctgtcaaaagtttttacttcttggaagaacatgacgcattaggcggactggaaaaagtgggaactatgcttgataaggcaagatacagcaattccctttccagtaaattaaccgcccatttacagaggataaaccgcaccgaccttatcccctatatccagtatgacacgaaacatgggaaagggggtatctgatgaataacaacgatattcccgtatgggaaaaatacacccttaccattgaagaagcgtcaaagtatttccgtatcggagaaaacaagttaagacgcttagcagaggaaaacaaggacgctggctggctcattatgaatggcaaccgcatacagattaaacgccgacagtttgaacaggttattgacaaattggacgcaatctaatgcaaatgagccttgtatgtgttatgatgaacacaagtcatatcaaggctctttccaacaaggaaaggagcagacaccatgaaagaaaaaagacgggataacaaaggtcgtatcctgcatactggagagagccaacgaacagacgggaaatacttatataaatatgtagacgcatttggaaacacaaaatatgtgtatgcttggagattgacacccacagacccgacaccaaagggaaaacgggaaaaaccctcacttcgtgaactggaacagcagataagacgggatattgaggacggtatcgacagcacaggcaagaaaatgacgctttgccaactctatgccaaacagaacgcacagagggcaaatgtgaagaaaagcacaataaaacaacgggaacaactcatgcggttattgaaagaggataagttaggtgctaggagcattgatacgataaaaccctctgacgctaaagaatgggcgttacgcatgaaagacaaaggcttttcctacaataccattaacaaccataaacgctcgttaaaagcgtcattctatatcgccatacaagacgattgcgtaaggaaaaatccctttgatttcaagttaagtgaagtcctagaaaatgataccaaagagaaagttgcattgacagaggaacaggaacaagccttactctcattcatcaagacggacaatgtgtatcacaagtattatgatgatgtgctgatactgttaaaaacaggacttcgtatctcggaactgtgcggactgacagtagccgatattgatttcaagaatgaagttgtgattatcgaccaccagttactaaagagcaaggaacaaggctattatattgaaacgcctaagacgaaaagcggaataaggcaagtaccattaagcagagaaacgatacaggcatttcaacgggttatgaagaaacgcccaaaggcagaaccatttgtgatagacggacggggcaatttcctatttgtcaatcataaggacaagccaaaagttgcgattgattacaacgccttatttgtccgtatggtaaagaaatacaacaagcaccacaaggacaatcccttgccacatatcacaccgcatacgctacgccatacgttctgcacaaggctggcaagcaagaacatgaacccaaaagatttacagtatatcatggggcattcaaacattagtatcacaatgaattggtacgctcatgcgtccatagataccgcaaaatcagaggttcagcgtctaattgcatagaagtatttaccacgattttaaccacgcttgatagcgaaaatataagaagatagacctagatatgtgaggtttaccacaaaagcaaaatgcccgtagagccgataaaataaggctttgcggacatttaagaagatataaaaagatagtcaaaaagacatatataatttacaagtaaccattatacttctttattattttctctacattactcagtccgtatccatgtttctgtttttctttctttgaagttaatatcttatcatccttctggtggatttcaccgcaataagtattcgtaatccgaccaattaaacgctcttgactaaacacaatctttatcgtcaatattcgttgttcccaatcaacttttttcaatgcttccaaagcattatccaataggttccccaatagcgtaacaaaatctgctatatcaatgtttaactgttccggtacaacaatttctgtttctacttttatattttcactcgccacactttgaagcttatagttaactaacccatcaataattgtatttcctgatgtactataaattacctttccttttatgaaacgagaaagttgatccaactgtcttcttgcctcttcattttttccctcttccagtaaatgattcaaaatgataagttgattactcatgtcatgtctaaacgcctgtaaatcttctgtagagctttgcataatctcgcactgtctgctgcataattcattttccttttgtaacaaagccagttttgacttctttatataattttctgctaatgaatcataaagataaaatgcaattatatttactgcaaacagaagtgacactgaacccactgcttctaccttagttaaattggtctgatttgcaataattacttccaaaattaatgtagaaatcggaattacaattgaagccagccaggaaatccaactaatattacgtccctttcttgttaactttatgttttcaagcagcagcgtttcacaatatgcaacaattcgcgcgactattaacccaaaagtatctctgaactcgccttgtgaaaaaactgaaaaattaatatatccagtcatagctgctgcaattatttccgctgctgccataaaaagatacatgtaaacaacataaataattctcttttgaagacttgcttcgtaagttaaagaaataatgaacatagtaattaaattcgtaatcaaagtaattaacggaatatctatcagaagatatactaaagttgtcattataaagtagaaggaataggctaatattcccaatattcttttgtattttctatgttcaaaaaaaactctcataaaacgatgaacaacaaatatcagaaaaaaattcgccagcagataaatgatatgatatgtatcaaacaccatgtacaaaccctccattttcaaaatgaagctgcattctcgctatttcctcttttctgcctctggcaacaggaattacgtcaccatttaccataataacctgttcgccctgaaaagatctgatataacgatagttcaccagataagatttatgtgtcagaatcattccctgcccttttaatttgtcgcagacttcttccaacgaaccatagaattcgtcttctgacttctgcattacaatctttacttttcttccgttacttttaaaatacagaatctcactcacacgggcacaatacatatcgtgaccatatttatagtgaaatatatcattcttcttcccataaatcctgttatacttttcaagcgtagcagtcaccatattctggtcaaatggcttctctataaaattgaatggtctgaaggcaaataactgacggtcatatccatcctttcccgatacatatacaatctgagctgcttcatcttttatctcatttctgatacaatcacttacactaatcccggtatcatctgcgagctcaatatccagaaaataaatctgataattttccccttcccgaagtttccgtttcaatactttccccgaaatgaaactctccgtttcagcttctatatggagtatcctgcaggaatcattaatataattttccagcagattacatatcttttcatcgtcatcacaaaccgcaattttaagcatttcttatccttctatccattcatgtactgttatctgtgttcattttttcactgttttagcaagtgcaacatatcctttgctttgggacactcatgttatgattatacgacataaaagaaagacgggcaatgttttccacacccgtctctctgaccgtctttccggcaaattatatcagtagggagatgactcccagctgatatagcctccggcaggattgcagaggtgcgcgtcatgcaattgcatgacgcgcacctcgcagcaagaatgccgaggcattcttgaacttatcattactacttacattatgcttgtttcttttgaaaaaatcctttcaatgccggatacagttctttaaattcctgatatctttcctcgtacttctgcaccagttccggatccggttcttctgttcctgttactttcacaagtttcttcgcagcctcttccaccgaatcaaatacaccacatccaactgctgccaggattgccgctccatagccaggaccttcttcgctttcgatcagatctactttcatattcatcacatttgcaatgatctttctccacagcggactctttgctccaccgccacagatctttgttctctctggattcacaccaatacttcttgcaacttccagagaatcacgcagtccgaatgcaacaccttccagcacagcctgtgtcatatcctctcttgtgctgtccatagacattccgataaatgctgctcttgcggaagggtcattatgaggagaacgctctcccatcagatatggaagatagaacacatggttctcgccaagccttgtgattcctgcctgttctgccggataatcttttgtcttaaggatttcatccatccaccatttattacaggaagcagcactgagcatgcatcccatcagatgataattgccgtctgcatggtcaaaggaatgcagtgcattgttcttatctactccgaatttcttactggaaataaagagtgttcctgatgttccgagagaaatattgcatccgccgtctccgaccgttgccgttccaactgctgccgccgcattgtccccagctcctgcaattacttttacatcctctgatacgccaagttctgctgcgatctctgctttcaaagttacaactacttcccagctttcatacagctttggaagctgtgcctctgtaataccgcagatctcaagcatttccgcagaccagcacttatgctccacatccaaaagcagcattccggaagcatctgaatactctgtgcaaaaagaacctgacagacggtatgcaaggtaatcctttggaagcataatcttcgcaatctttgcaaaattctccggttcattttccttcatccagagaatcttcggtgctgtaaatccggcaaatgcaatatttgctgtatactctgaaagcttctcttttccaatcacctgattcaggtaatcggtctgttttgcagtacgtccgtcgttccacagaattgcagggcgaatcaccttgtcttccttatcaagcgcaacaagaccgtgcatctgacctccaaaactgattccctttacttgatccttatcaaagccttcaagaagctctttcagcccttccatactctgtgcaaaccagtcttccggtttctgctctgaccatcccggatgtgggaaatataacggatattcttttgatacgatattcttgatctttccattctcatccatcagaagaagttttactgcggatgttccaagatctactcctacaaataacatgttgttcctcctgtataaagacagagagccttgccgtttccggcacggctctctgcccgttttctatgcttataactttctatgtaattaaccccacggattctctgttggatatcttacacccttcggctggttgtatccgatttcttcaaccggcacaccaatgtatttaaatacttcgaacaatgcttttccaaagtgtccgaaagcaactgctccgtgatgtggataattcttttcgatcagtacgtgacggtagaatcttcccatctccggaattgcaaacactccgatagatccgaaggattttgtagcaaccggaagtacttctccctgtgcaacataagcacgaagtacattgtcagatgtactctgcagtctgtagaatgtgatatctccaggtttgatatctccttccagtgttccctgtgtaacctcgattggaagagatcttgccatgatcatctgatatttcatttcgcagaaagcaagtttgccggaagctgtatttccacaatggaatcccataaatgtatctttctgtgtatatgggaattttccttcaatactttctttgtacatatctgccggtactgtattgttgatatcaagaagtgttactgcatcctggctcacagcggttccgataaactcactgagtgctccgtaaatatcaacctcacaggataccgggattccctgagctgtcagacggctgtttacataacatggaacgaatccgaactgtgtctggaatgccggccagcattttcctgcaattgcaacgtattttctgtatcctctgtgctcctcaatccagtctttcaaagtaatctcatactgagccagcttcggaaggatctccggtttcttatttcctgctccgagctcttcttccatctcttttacaacggccgggattctttcatcgccttcatgtttattataagcctcgaaaaggtcaagttcagagttttcctcaatctcaactccgatattgtaaagctgttggatcggtgcattacatgcaaggaagttcagcggacgcggtccaaagctgataatctttaagtcacttaatcctacaactgctctcgcaattggttcgaactcatggatcatgtcagcacattcctctgctgttcctaccggatactccgggatgtaagcttttactcctctgagtttcagattgtagcttgcgttaagcattccacagtaagcatctccacgtccctgtgtcagattgtcttgtgtctcctctgcagctgcaacaaacatcttcggtccgtcaaaatgttttgcaagcagtgtctctgaaatctccggtccgaagtttccaaggtaaacaactaaggcattacagcctgctttctttacatcttccagagcctgtaccatgtggacctcactctctacgatacagattggacattcatagactgttccctcaccgtatttctttgtataagcatcgatcaatgcttttcttctgttcacggaaaggctctccgggaaacaatctctgctcactgctacaacaccgatttttaattctggcatgttattcataataaaatcctctctttcttatcttattcacactattgctttcattcgaaaatgttatccacatttcagcacttctgtttgtgaacaactttctttctacctaaatattaatattctcaccttttaatccgcagaatgctccttcaatctgtgcatcctcatgcgcaatcagccatttattcatagctgcaagaagtctgttttctccctctttcgctgtttcaaatggaagctcttcattcgttcctttcggcagaactactacacaacggaatccaccttcctgtgcagtacacggtgcataatgaagtgttgtcgcatacagttctacaccggttcctgccggaacaaaaaatgcttctaccttggctgtatcatagatatcgccatcttcaatatcctgctgcattccaagaagcaggatcagatctgtctgtgcgatatcaaattctgaacttctgtgatattccagtgcattcagtttatggttgtctccattacagtatccaatctggataggcagtccgccgaatcctttcttgcagatttcagctgcttctggaagtacttccaactcttcaacagacggtacatagacaacgtctttcggaagtggtgtgtgttccatctcttttaaaatcttctcaaaagagtattccgtgatgatcttgccatattttcggaaagatgcatctgttacattctggattttcatgatgtcctcctgaattttcttctgtatcctgtttcgtttgtttctatggtcattttaccaactcaaaagggcattatcgaccaaataattagccaaataatgcccatttcttatctttttagtaattcttttgtcgttaatagcattctattccacgccccatcattccttcggtggcaggaatcccttacttgtcttcacgattactttatcaaataccatgaacatagacggcagtacgaagattacgactaccatactgatcagtgctcctctcgccatcaggatacacagggaactgatcatatcgatattggagtaaagtcctacaccgatcgttgctgcgaagaagcttagcgcacttaccatgatggactgtgcggatacgcggtgcgcagttgtgatggaatcgtatttattcgcgccatggttacgctctctcttataacgagttgtcatcaggattgcataatctacggtggatcctagctggatcgttccgattacgatagatgccacgaatggcaacttagttcccatgtagtatggaatacccatattgacgaaaatcgcgaactcaataacgcctaccaggatgatcggcagtgagattgacttgaacagaagcatgatgatcacgaaaataattccgattgatactgcacttactgtcttgaagtctttatctgtaatgtcgatcagatctgctgtcagaggaccttctccgatcagcattccaccttcatcatatttatgaagaatcgtattcagttctttgatctggtcattcaattcatctgtagctaccttatattccgagttcgccagtacaagctggtacttatcattctttaatgatcttgtcactgaatccgggatcatgcttgccggtacggacggcccgatcagggagtcaagtccaagtgcccatttgattccgtccaccttatccatctcattcagcatcttgcctacgtccgctgaatctgtagagctgtctacaagaatcatgtgcgtcgtattcatgtcgtaatcttccttcaatttctcatttgcaatgatactcggaagatcttttggaagtgtctcatccaggttgtaataaacgcctgtatggttatttccgtaaatagccgggaatagcagaactacgaacagtgccacatagatgagatatctcttagtaaccttatctgaaatctttccgatatccggaaggaatggtttatgttttgtcttctcaataatcttgtcacagcacaggatcatggatggaaggattgttacgcaggcaagtacaccaaggataacacccttaaccataacaacaccgatatcaagtccaagtgtgaatgacataaagcacagtgcgataaatccggcaattgttgtgacggagcttccgattacagatgaaaatgtctgtgagattgcatgtgccattgcacggtgtttatctccgtcgtaacggatctgctgttcttcgtaactatgcatcaggaagatcgaatagtccagcgttacccccagctgcagaactgctgccaatgcctttgtaatataggagatctctcccataaagtagttacttcccaggttatagacaatcgcgattccaatactgagcatgaagaggatcggtacaaagaacgattccattgtaagaccaagtacgatcatcgccagtacaaccgcgatcaatacatacaacggtgtctctttctccgccagctccttcgtatctgtaacaacagctgacataccacttaaaaagcactgctcgcccgccagagaacggatctcggagattgcttccattgttccatccgaagatgttccttcatcaaagaagattgccatcatcgttccggtctcggaattaaatgcatcataaacctttgtcggtagcatactcttcggcatactgatatctgcgatagaatcataccagataacctcttttacatgatctaccttctcaatcttctcttttagcttcgatacatccttgtcttccattccatcgactataaacatcgagaatgcacctgtaccgaaatcatttaccaaaatatcctggcctttcatcgtctcgatgttatccggcaggtaagtcaatacatcataattaattctcgtatgcagataccccaatgcagacggaatcaacaataagatactgagaatcagaatcggcactctgaattttactatcttttttccaaactttaccatcatatacctttcgctcccttccttatatcttgtttatgaccattggtcattttaatctcttattgaactatacaataaaaatgactaacagtcaatatattttgtactgttagtcattttttcttttttatttatattcctttttcgtaactgttcagagccaacctccaaaatgttcagagccaacctccaaaatgctacgcatttcgtcggtgtggcgtatccgccaaataaaatttcaaaaacagttttaaaaatgcaagcatttatgcctgtttttgaaattttgcttggctctgaacagttacccattttctctatattcacttggaagaattccgtattttttccgaaatgctcttgccagcgccttgcttccggagaatccgctgcgaagtgctgtctcagtgatattatattttccgcccttcaggtctttcattgcatattccagacggatattctgtaaatagctcttatatgtaattcccgcatacttctgaaacatcctcgacaagtacgttggtgagtagccaaaaattcttgccacttcttccagactgagctcctgtgcataattctctttcatataagatgtgattgctgaaagcttgttcagattcttattcttccttacaaaagcatcctcaacttccgtcagacggtattctttcacaaggagatataaaagatgataaaaaatactgttcatcttcatgtcatatccacactgcttttcacaatacgtcttatacagttcttccaacaattccataaaacgcgcgtccttacgtcccggttcatgcgtaaaccagataaattgctctcctgtataatatttttcaaaaactttcaacggaatctgaagaacgatcgtctcgtttggcaacggagaatctacttcatgaacctcattcgaattcacaatcataaattctcccgctgtcagatgccaggtcttctcatcgatcttaaattccagttctccgtcgcacactgcaaaaatctcaatcgatctgtgccaatgtttttctctatggtaatgtccttctctgccttcaaataagaatagtttaaaagaaaatccaacttccggaacgatcaattcatgcgcaaactgcatctcttttattcaccacactttaggctttcgtccacttatgtaccgtatctgttcccggactacataattccactgtagatccatcatctgacagtgtatagacatattccagtgttccaccggagataaccagattcagcctcaatgtaccgtctgtattctctgctacacaatatgttccctttgtctcaccggaggaactcttgatcacaagctttccgtccttctttaatttatattcatttccgctgttgtctgtccactttccgatcagccccttcgcacggtcatccgtcagatccagaaggtctgtatccgcctggaggaacttcatatcctttccgccatctagagacttcagtactatgccatagcctgtatcatctgttgtaaccgcatacagtttaccttcatcttcgccgtccattgtgatcttgatcgtaatgttgttatcctcatcaaatccacactcaaatgtcagtccggcgtcatccttcgttcctgttccatcttctttcagatcatacacagtatctgttccaatcaccttccactgttttgccataactctcttaacagaatcacttggaagaaccgcgttgtctcccatctgttctttcatcgcactgcttgctttgtccacctcttctgtcttagatgcagccggttccgctttcttcgtatcgccacatcctgtcatacacaatgtgcttgccagaagtaatgctactattaattttttcatattctctctccagtcttgttactgttcacatgatgtgcgaccaataacccagtcttttctgtctgatcaggaaggcagcatcccgatcaggacttacagtctttagagtatcacaaacgcgctgtaaattccagtaaagttaatacaatttcacggttatttcatttttagacacactcgttttcgtctgttttcaacaaactttaatgcttttgcactgtttcactttacctcgacagcttgtttattttcttaacatatgatacactattcacaatgtaaaattataggtaacttgggaggaaataggttatgattatctctacaagagggcgttatgctctccgagtcatgattgatctgtctcagcaggatccggaatcttacacaccgctgaaagagatcgcagcacgtcaggagatttctgaaaaatatttggaaaatattttaaaatctcttgtcacacaaggatttatccttggacttcgcggaaagggcggcggctaccgcctgacaaaatctccggaagaatacactctcgcttccattcttcatgcgacagaaggaagtcttgcggcagtagcatgtttggaggatcatgcaccggaatgtgcacgtgctggtcaatgtccgacacgtccgatctgggaaaagctggataatcttattgaagattatcttggaagcatcacgcttgctgactttcacaaaccgatcattccatgcaagattgagaagtagcattatttcagggggaacgaaataacagctgtttcaaacaatgaaagttcagatctacatagaaaaagatggctaagcattgagggcgttgcttatccatctttttctgttttctttttatttatttttcactgctttttcaatccgatccaacgcttccacaagcgtcgctctctggcaagccacgttgatccgctcaaaaccacttccaggctctccgaagatcgctcctccatccagccaaacctctgccttatcttctatcagttcttttagttccttatctgaaagccctaatgcccggaaatccatccagacgagataggttccttctgtctttgtcaccttgatctgtggtaaatgctctgccatccatgtatgaaggaaatcaatattcgacttcacatactgtttcatcgcctgataccattcttcgccctgagtatacgcagcgatcagcgcaaagattccgggtgcgccgacctgactatacccggctgcagttacctgatgctgaaattccttgcgaaggcttgcatttggaatgataatattggaaatctgaagtccagcaagattgaatgtcttccccggggaagtacatgtcactgtaatgtctttatactcgtccttaagatctacaagtacctgatgcttcccttcaaatacgaagtctgcatgaatctcatcacttacaatgatcacctgatgctttaggcaaatgtctcctagacgctccacttcttcccttgtccatacccggctgaccgggttgtgtgggctgcagaataagaataattttacacccttttccacgatctggcgttcaaaatcttcgaaatcaatcgcataagatccatcttccttacggataaggatattggcggccactttacggtcattgctttcaatcacttcccggaatggataatagaccggatcctggatcagaatataatccccgggttctgtataagccttcaccgccattgccagtgcaaagacaattcccggagtctttgtgatccactccttgtcgatcttccatccgtgacggcgttccatccaggagctgaccgcatcataatactcctgatccgactctgtatatccataaattccatgctctgcctgacggatcaatgcttcctgaacgaaagatgacgtcttaaaatccatatcagcgacccacaacggaagaatatctttctttctccccctttcttctgcaaaatcatacttcagactgtgggttcctcttctctctacgggctggtcaaaattcagattcttctcactcatttttactccttcttattgaaatgcctgttccagatctttgatcagatcttcagcattttcaattccaacagacattctaaggaaatcttctgtgattccaagacgttctcttatctccaccggcacatcaccgtgtgtctgaagcatcggatatgtgatcagcgattctacaccgccaagactctccgcataagagatcaatttcacgctttcaagaatcttccttgtacgttccaccgtatctacacggaaagaaagcatacttcctgctcctgtcgcctgcttccggttcacctcgtaacccggatgatcttccagccctggataataaacttctgtcacttccggtctgtttttcagccaaagtgcaatcttcttcgcattctcctgctggcgctccagacgcactgacaacgtcttgattcctcgaagcacaaggaaactgtcaaacggagacagactacagccaactgtcttatatgtataacgcaatttttccgacagctctttccctttgacacagacaaatcctgcgagaacatcattgtgtcctccaagaaattttgttccactatgtactacaatatcagcacccaactgtagcggtttctggaaataaggagaaaggaatgtattatccgcaagaatcagtaacccgaattcgtctgcgagttttctcatctctgcaaaatctgtaatcctcatcgttggattgcttggtgtctcaatataaagcgcctttgtctctttcctgatattctttcttacaaggtcaatatctgaagtgtctatataagaaaactttaatcctctcttttcgccaatgctttcaaacattcgcacagttccaccgtacagatcttctgtacatagaatatgattgccttctccgaaaagctccaggcagattccaatcgccgccattcctgtcgagcacgcaatactgtcatctgctccttctaaagaagacattacgctttctaattcataccgtgtcggattgctctcacgagaataatcatatcctgtgcttttcccgattcccggatgtgcaaaagttgctgtctgaaaaatgggaacagagactgctccgtatggatgttcctctacaaatcctccatccccgtgaatacatcgtgtttcaaattgataattttctgccatgctgtctatctctgctccttacgttcctctccactaaatatagtacattccctcaacagaatcctgatacccttcgtatgcatccacaagatccttaagcgtcacatcttccagaatctcctgaacacaatcattgattcgatcaataatcagatgctgaattgcttcctgatctccacgtcccacgttgtttcgatcaacttcatcttccagatcataagttccttccaatgcctctacaatctgcgcaaccgtgatttctttcggatctctctccagaaaatatcctccctgggaacctttcatactttttacaatatgacccttgcgaagggctgaaaatacatgctcaaggtactgagcggaaatgtcatttctctgtgcgatacttcctaatgaaaccagctctgtccgtgaattcaccgccaaatcaataagagcacgcagtccatatctgcttttctttgataatttcaaacgattctactcctttcttctaaacactataggagcagcttttactgctcctacttcttacagatttctctgttttctctgattgctatttactgaattgctttgaatgcctcatccagatcctgaatgatatcatcaatattctctgtaccaatagacagacggattgtgtttggcttgattccctgatcgagaagctcttcctctgtgcactggctgtgtgttgttgtggccggatggataacaagtgatttcacatccgctacatttgcaagcagtgagaacaggtccaggttatcaatgaattcctgagcctttgcggaatctcctttgatctcaaatgtgaagatagaaccaccgccgttcgggaaatatttcttataaagctcctgctgcttcggatccggatctacagatgggtgatgtactctctcaacctgcggatgattgttcagatactcaacaactttcagtgcattttccacatgacgctctacgcgaagggaaagtgtctcaagtccctgcaggaagataaaggaactgatcggagaaattgttgctcctgtatctctcaaaaggattgctctgatctttgtaacaaatgcagccggtccgcaagcttttgtgaagctgatgccgtggtagcttggattcggatctgtcagtgaagggaactttcctgaagcctcccagtcgaacttaccgccctcgatgataactccaccgattgttgttccatgtccaccgatgaactttgtagcagagtgaacaacaatgtcagcaccgtactcgattggtcttacaagataaggtgttgcaaatgtattatctacaacaagcgggattttatgcttatgtgcgatatttgcgattgcttcaatatcaactacatctgagttcggattaccaagtgtctcgatgtaaacagcttttgtgttctcctggattgcattctcaacttcttccagattgaaaatgtcaacaaatgttgttgtaattccataattcggaagtgtatgctcaagaaggttgaaagatcctccataaatattctttgcagatacgatgtgatctccctgctgagccagattctcaattgtatatgtgattgctgctgctccggatgctactgcaagtgctgctgtacctccttcaagtgctgcaattctcttctcaaatacatcttctgtcgggtttgtcagacgtccgtaaatatttcctgcgtctttcagtccaaaacggtctgctgcatgctggctgttgcggaacacataagaagaagtctggtagatcggtactgctcttgcatctgtcaccggatccggctgctcctggcctacgtgaagctgtaatgtctcaaatttaaattttctgtcttttctctctaattttgccatgggtttattctcctttttctaattcttattttgtattcttattccgcagccaaagctgtttggaagttaaaatcttacttagttaatgcctttgtcttgatattcgtgcctactctgtaaagagtggtgtagagtagtatctgtctccgctgtccggaagaagtgctacgattgtctttcccttattctccggcttctttgcatatgcgattgctccggaaagtgctgctcctgaagaaatacctaccaggattccttctgtctttgcaagaagcttcgcggctgcgaatccttcgtcattgtctgctttgtatatctcatcatagatctttgtattaaggacatccggtacgaatcctgctccgattccctgaatcttgtgcggtccgccctttccttctgaaagtaccggagatgctgcaggctcaagtgctacaaccttcacatccggtttctgtgacttcagatattcaccaacacctgtcagtgttccacctgtaccgacaccggcgataaagatatcaatatttccatctgtgtctttccaaatctccggtcctgttgtctctctgtgcgccttggagtttgccgggttcacaaactgtcccgggatgaagctattcggaatctctttcgcaagctcttcagcttttgcgattgctcccttcattccctttgtaccttctgtaagtacgatctctgctccatatgctttgaggatatttcttcgctcaacactcatggtctctggcatggtaagaattgctctgtaccccttcgctgctgcgattgatgcaagtccgattcctgtgtttccggaagtaggttcaatgataacagaaccttctttcaggattcctttctcttctgcatcttcgatcatcgccttcgcaacacgatcctttacacttcctgccggattcagatactcaagctttacaagaattgttgcttcaagtccaagctctttttccagattcataggttcaacaagtggtgtgtttccaatcagtccaagtgtgcctttataaattgcttccatagtctatatcctcactttctttattaacctacttagttggtgtgtttttgatggtttgtattatatacttataaaacccatctgtcaactatgttttatatttttcttcattttttattatacaatatcgatcggagatgtaaatgatccagtgttaaattgtttttgagcgataaaatctacttctgtagagccatatttacctacaatggctctttttcaaaaaacattcccatttcagaatttattttttgttttcaaaaaaagattcccatttgggaatcttttcctacgtcgtctctctctatcagctttgttccgaacaccatgtgctgcaccttggtttctcatcatccgccgcttcaatgtcttccaatatcatatcagccgcccgctgtcccatctcacgacccggcagctccatggaagtcatggctgtctcaagcattccttaatgaatcaaccagttataatcttttctgcaatcaacaatatactccacatataccgtatcatcctgtatctgataaagaaccagataccatttttcaataaacatcttatgatatttatttggtggaatgtacgcttcttcaaaaaatggaaaacgctgcggcatatgattcaaggaacggattgctgctattatttccttcttttttgtgctggcggcatctttattaacctgagctataaaccgaatatgcgctcccaacatcctctttgccctgtcagaaacaattactttgtactttttatctgtcattcactatacctctgcaatcacatcctcaagatatgcgtccagttcatctactgtgcatccacttctccctgccatccgatcctcttctactgcaagcagttcctcccttaacttcaacattttttctctacgattgaaggtttctatatccatgacaaccagatcaccttctccgttttttgtaagaaatacgggttctgcagtcttacgacacatatctgcaatctcattataattttgacggattgctgctgatggacgaatattcatactagcacctcctcaagttaatcatagtaatattctaactatattatatctttttatcgctatctcgtcaatttgattttccttttccgtagaatgttttaatccatctcaagtatgctctgaattctgattcgttgatagaatagtcgtcgttaagtggtactgatactgctgggaaaattgtcttgaaattttttacttttgccatttttattgtctcctttttcttgtatgagataacatgatttttaatgtttcataacaacgcgcattgttcatttctttctatgcaaacgtttgttgtttgctatgattaggttatatcacacaaaaaagagacggtcaataaaataaccgtctcctgcaatttgttgcataaatcagagaaatagtggggttaactgcaataattttcgcattatatgtgttactttttatgttgatttttatcaacatatttgttatcatatgttcaggctttatgcctagggtgctacttcacattgacgtgaatggcggttcgctttgcgcggagagtttatagctccgattacatagatcatctctcatttgagaaatcttggaaaggagaattggcctatgctgaccattactgaccttatcgcagttatttcactgtgtgcgactttttatagccttggttacgtgcgtggaaagcatgattccaagacgcaaaaataaccgcccaacgacctgagaaaacttgagcggttatttaaccctataaaacatcaggcgaaccgtcatcggtagcacctttctatttattatattagcatttcttttttcttatgtcaaacaaatctttcactctttacctcacacgatgtgcgatcagcagcctcacaccgcactgtcactctgctcttcccatccagcgtacatgtgaacaaacttaacgcccactctccgcttgtcatatcttccacgctttgtggagtcagtgcctctaccgccgccactttgtattcgaaccggttcccggctgcatctgtgaagatcacctcagttccaacttccagttccttcagcttcccgaaatatgttctgtaattatgtaccgtgatcacgagattatccagataagcactgcccgaatagcgacaaggtgccctcttcagaaacggatagctccactcactcagtaccggaagcttcaggtcaatcgccggtatctcaagaattcctatacatgccgcgccgttgcttttatcgatttaagataggtgtcagcagcttcctgtgctgcctgaaatacgccgcttaactgcattgctgaatcagcaattgaccctgacttctcaatcgtaatttctctgtccttaagctgtgcctcagcttcgtctagtctagcctgaagctctatctcccgtttttttcatcaatattgttgcggtatatttgtgatttcttgtgaattttcaccatttttccgtattttacaccaaaaagagacagagccttttctcgcattggaaaagtatctgtctcttaatttttcatctctttcaaaattgattagaattcagcgatcactgtctcgccctgtactgcatccattcctgtgtgcagcttcatatccggataatcgtctccgttcgtaactacgagaatacatgttttctcatatccgtgtgctttgatcttctccggatcaaatgagagcagcttgtctcctgcgcttaccttgtctccttctttcacgaagtactcgaatccgtcaccttccatgttcactgtgtcgattccttcgtggatcagaagctctactccgttcgcaagtgtaagtccaactgcatgtctggatccttccatcagtacagatactgttgcgtcacatggtgccacgatcacattctcaaccggctcgattgcaagtccgtcacctaatgctttagatgagaacacttcgtcctttacttcctcgattggtactacttttcctgacagataagcctttacggcaaatgcctttttctcctctgcaggagcctgttttttcttaaaaaatgaaaacatacctacttctcgcctctttcttttaaacattgtccattggtctcaattacggtcttataccagtcaaatgatttcttctttgtacgtctaagcgttccatttccattgtcatctttatcgacatagataaagccataacgctttttcatttcaccggttgaagcactaactaaatcaatgcacccccatgaagtataacccataatttccacaccgtcaatctctacagcgtccatcatagccaaaatatgtgcttttaaatattctatacgatagtcgtcttccacataaccgttctcatccggctgatccaccgcaccaagtccattttctacgataaaaagcggcttctgatatctgtcatacagtgcattcattgtaatacgaagtcccagcggatcgatctgccatccccattcacttgctttcagatgtggattctttactgtagcaaatacatttccatctgttgtgtcaacgcttgcatccgcacttgcgcatctggaagagtagtaagaaaatgaaacaaaatcaactgtattttctttcaggagtttttcatcttcttctgtaatatcgagctggattccttctctttcgaagaatttctttgcataagccggatattcacctcttgcctgtacatcaatgaagaagtaattttcacgatcttttcccatcgctttccatacatcttctggcgcacaggagtatggatatgtctgacctgctgccagcatacatccgaccttattctctggatcgatctcatgagcgattcttgttgcttctgcagacgctaccagttcatgatgtgctgcaagatatttcgcctgtgtctcattttctctttctttaaagacaagtcccgcccccataaatggaaggtgcagaatcatgttgatctcattaaatgtcagccagtattttacaagtcctttgtatcttgtaaagagtactgttacaagtttcttatagaactcaatcagttttcggttcttccagcctccgtactctttggtcagatgaatcgggcaatcaaaatgtgtaattgtaacaagtggctcaattccgtatttgtggcattctttaaatacattttcatagaattgaagtcctgcttcatttggttctgcatcatcaccgtttggaaagattcttgaccaggcaatcgacagacgaaatgtcttgaaacccatttcacctagaagcgcgatatcttctttgtaatgatgatagaaatcgattccttgcattgccggataaacatgccctgtgtccggctctaacgtctctccatgtccaagcattaccttgaatcggtcttttcctgccggacatatatcgacattggccagccctcttccatccacattatatgcaccctcacactgatttgctgctgttgcgccgccccacaaaaaattttccggtaaactcatcttactgcctcctgctgaatttttctgatttttctgatttattttcccatgtaaagatgcaccattccttcaacgccaaacggttcaattggcagataatggctgattgcatctctcatctgtgtacctagtgtatttgttacctcaattgccagccggttctcaccctctttaagaagtcctgtcaactcaaagcgatatggcttacagatacgaacacctgcggattttccatttacaaacacttccgctgtctcataggcattgcccagatcaagccaaatacttctttctatatttttcttttctagctgggttgttccttccatagcgcacggttcggatttattttcaaatcctgtaatactgctgatcagatctagcttttctgtcggaactgtttctatgaattctggataggaacagctgtctgcaaatgttactttccatttttccggaagcagattggttctgtcttccatttcaccatctgtgccaaatgacttcttgccactttctctatcaaattctccagtgaaaccagcctccaatttttctgcaatcgccttcacttgactttcttctccctgaagaaataccactgattcatatggttgcagaacaagccttgctgtctgtgatacttctgtcaaagtattggcaaatgcatcgtaacggtagactgtatttccgtctgaaattgtcagttctgtgtcgattgtatttccgatattttcattaaataacataagacaatacacattatttttcatatattctccgactgcaagctccggatacgcattagtaaattttactgcctgatattgtcctaattctttctgcacatcaaagttataaatctctttttcaagatagatcacacgaactcccgactgctctaattgactaagaagctcttttccctgctgtggcaggaaagtgctataaggaacaaccagcacctcaaaattctgtccattgatactgtactgtttctcctgcagctctgcgcccgcaaggtaatccagtgaaatgatatcaaagctgatctgatgttctgttagtgctcttgccggtttctcgattggcatatactctccgccccattcctgctcagccgggtagagcactccgactttcgccgggtgtgttccatcccggaacaattccatcagacgattcacataattactgaatgttgagaaataccgaaactgcggattcattccatgcgcatagaaatgcggtgggcagtcgaagtccgggaatttctttggatcaaaagcatgtggaacaatgtgattgattccacggacgatcaggtgatctgcgatccatttcatcatcttcagtccttcgttccatccgtaagctccgaaggcttcacacatagaattaccgttcttgagtggatctaaatgtgctgcggatgaagccagttttgcaagtgcataatggtaaaattctccattgcttccaccggtattgaatgcgtcatgatgataattcatccccggaacgatctgacctccgatcacatcgattcctgcgtagtccatcgtctcctgtccacggaaataatgtcctgttccgtaaccgagtcttgcatgtgcaccgttgtcttcaattgtatgtccaagatacatcacaccatgtgcatggcaccagtctgaaagaacatttgtaaaattatcacgatacagcgttgtgatcagatccatgtagcggtaacgaatttctgcttcagcaccgtttgcatttacccataaaagcggcagatattttgcatcaaattccagctctttttcaaggccttctctccatggaagaaccatatcagatccgattcgtgcttccgttcctttttcatttccaaatctcggttcatctgagaagaaaccttcaatcaacgttccgaaatcatctttataatgtgcatagtgaggttcataaacctcatcaatgagaatttgcgttgcttcttttacaagtggattaaggtaatcttttgtcgcctcttcaccaccttttctggttagatacagaataaaaatactccacgcaccgtctttaacatccaatgtcagaaggcgtttttccatgtccatgcaatccgtaatatccgttagtgtctctgcatcaactggatctccctgctctgtataacggctgcttcgttttgccatgtagactttcaagattttctgctccggatccggcttgtcccacggtcttccttttaaaagctttaaatcaatgcgcatctgtcgcatcggtccttgcacatcatagcgacgcatatccagatatttcttcagatactgtggatagcattcttttacttttccattcgcatatcctgttggaaaatgggaatcatcgagaatccagaccttcatctcattttcttttgctttcgcaagaatcagatccagatcactccaccactgctctccaacgaagtccggatgtgggcgtgcctcaatgcacacccctttcatcccactctctgctatcttgcccatatattcactcaataccgcatgttcttctccatgctgccaaaaaaatggatataatccgttcttcatccttcgtctacctcatatcattactatctacaattaatttttcttttcttcttttccctgtacaatatatgccagtaccgctgaaactccaaaagcgagtactgcacatgcgataaatccatagaagctgacgtccagtccagctggattaatcattccaggaatacggaaaagtccgtctcctgcaagtgcatataattttgctccgagtcctccaagaattgctccggagattcctccgcctacccatgcacaggcaaataatttcatatttggcacagcgatagaatagattgccggctctgttactccacagagtgcggatgcaagactaccgaatccggcgctacgtttatccggatcttttgttctaagtgaatatccaagtgctactccggcaagtgcccatactgtcaatccgagaatcgcgttgattggatcgcttccaagtgtaaacaggttattcatcaataccgggataaatgctgcatgcaaaccaaggagaacaactaactgccagaatgctccaaaaagcaagcctccaaggattggactgaaattaaagattccacaaactacagttgaaagtccattagaaacatactgcataaccggtccgatcactaaataagaaagcggaactgtcaatgcaagtacaactgtaggaaccatcattaactgaatcatctctggaagcaccttctttgccagcttttccaccttgcttgcgaagaaagatgccagaatgattgggaataatgtgttcgcataagttgttgtagataccggaatatggaggaatgtgattccaccttctgctgcaatcgctgccaccagattcggatatacaagcgccgctccgattgcagccgtcgtatacggattacaatcaaaaatctttccgcatgaaaatcctacgataatcggcataaagtacataattgcatcagatgctgcataaagtacaaggtatgttccatctgtgtttgtgaggatacccattgttgtaagaatgacaaggattcctttcaagattcctcctgcgatcattggacctatcattggcatgatacatccggagatcaccttaaagaaacggttccaaagactgtcttttttcatcacctggtaatcttctttatttaccgccttactgttccctgtgattccggcttctgtctttacaaacttaactacttcacttacatgagtaccaatgatcacctggtactgaccaccctgattcataacgcctttgacacccttaatcttgctcacctcatccttatttggaattgtatcatccttcaaaacaaaacgtaaacgtgtcatacaatttgatacactaacaatattttctttccctccaacagcagctactgcttcctttgccagctgtccataatcttcttttgccatgatgtacgttcctcccattcatcactcacacttaatatctaatagtttctcgaaatgcatttctttattgtctatattatagccaaccacatattagaaaaaaatatcagattcctcactttttattgaccatttccacacaatctgctacacttcatgcaaaggaggtacctgtcttatgaatctgaaagcactacatcattatcttaccacgttatccccaagtgaggagaaatatcgcaatggatatgtctatgatggctggaaagatatgccgagaaaacaatgtaatggcgtagaatacactatattggacttagatgttgcttattccccacttgacaacaagccagccgatcactctcccggacttaatgcggaactctcggaaatatcaattaagaagaattcccgcttcagtacagttccagaacatatccatacccacattgagattaactatgtctattccggaagctgcccgcaggttattgacggacacccgatcactctgcaaaagaaccaggttctcctgattgacacaaactgcccgcactcaattgctccgcttggagagaatgatatcatgatcagcattatccccaagacggactttctgcgtgagcatatgtttaatcagttttctaatgacagtatactctcccgcttttttattaatgcgatcaacgaaaagactgaccatgaccactacctgcttttccactcagaaaacgaccgtagaattccgatgttctttaatgaactgttctgtgagtgctttgatccatccattaattctacagatatcatcatgcatcttttttacacgatcatggcggaattgatcaatgtctatgaagacgatttgacaaggggggactcctactcacacaacagcgttgtgattcctatgctgcgttatatggaacggaatttcagaacatgtacacaggaatctgtcgctgactttttccatatcagtccaaactatgtcacgcgtcttctcaagaaatataccggtatgacttatattcaattgatccaggcgcagaaactgcagactgccgccaacctgctgagacagacagcacttccggtaaccgaaattgcccagcgagccggatatgaaaatgtcaccttcttctataagaaatttcaggagaagtatcactgccagccgggggagtatcgggggtaggtgaaaaacttataccctttattttacctcttcataggttcaaaaaagaagagtcaatatttctggatttcttaacaaactcgaatattgactcttcttcgctattatttataactcaatttttttgtttataaaatgtggataacttttcataatcccgccagatccacctcatatctacatttttccgaggttattcgatgtgtttcgttacatttttccgcgttttttatcggtttctgtaacatttttctgcactttttcactatgttttgtaacattattctcgcatcccgattagaatcttctttccttcaaatgcaaatccataatgtctgatttcttcttttttgaatccacgtgcaaaaagctgtgcatcatagttcatttcttcaatctgattcagcgcatgctccactgtctcttccaacgttttttctttccttgagttacgaactttaaactccataatgattgcaggatattgtttatctccctgttcccttggaatcatcattacatcatatcttccaaatccgctctctcgattcgaacagatttcatattgatctgcctgatccgcaatcaatcccaatacaaagccatgataaaatcgttccggctcacttggtccttcttcatttcctgatgtgtcaaagtaactaaatgttgccattgaaacctgattcatataatagttcatcgcatccagatcaccggcgagcagtgccttcataaattgattataattcgatctgctctgatgaaaccatcccttaaataaatttgagaacattgcggttgtttccaaattagtaatcatcagatgataccatggttctcttagaactcctcgatattctacgtctgttgccttcagatatccgcttgccagcatcagactccagatggcattctcatcctgatccagctgttcaaacacaatctgttcgtcaaaatttactacgatttcttttccttgcagaagctcttccatccgttctttgatttccgatgaggattgtctgatcagtcgattgatcaaaccattcgaacttgtatctgcccaatacggacgcaattgttttttatccagatagtttgtgatagaccacggattataaatgtctttctgttttccaaatataaatccgtcataccaggattttacaagctgtttttcttgtgacattcccattgtttccaatgcatggaatacttcttcttcagtaaatccaaagcttgattcatattcttctgatgttgttgtaacaacatttaagttgttcaaatcagaaaataccgattccttcgacactctcgtgatgccagtcatcattgctctttcaagatatggattggttttaaatgttgcattgaaaaagtttcttataaaagcaatgaattcttcccaatattcatagagatatgcttcttgcatcggtgtatcgtattcgtccagaagaatcagaactttcttctcataataacgatacagacaattggacagattcttaactgcattgcagattgtatcatttgctaccggttctttcattcctggattcttggcgtaattatccagttcttcaaagcatcttcgctcaccttctgtaaggccgttccattccaggagataacgatgctcggaatatgcttcattgatcgccatgatgattccatctcttgcatcctgataatcagcacctttaattgtagcaaagctaatgaatatcactggatatgttccttgtaatttctgatatttttcttctttccagacagaaagatcttcgaataatttcttcttatccgtatataggttcgagaagaaattattcagcatactcatatttaatgtcttgccaaaacgacgaggtcttgtaatcagtgtgatctcatcctgtgattcccaccattctctgatcaggtcagatttatctatataaaagcagttgttctcccgcaatgatgcgaaattttgttttccaatgcttattaccggatgcataatatttcccctcgctttctactctgcaactttatctacacaatctgatactactagtattgtaacattgttcactaaaatactcaacaaatcccatttgcccaatactataaaatcagtaaccaaaaaagtgtctatatcagaaccttttatcgttccttgatatagacactcttctttaacaatcatcttgtcaactaattgatattttcgccgtttgttgaaataacttctttataccactcgaaagaatctttctttcttctggacaaatctcctgttccatcgttatgcttatccacatagatgaatccatatctcttatccatctcaccgcttcctgcactgacaaggtcgatgcatccccatggtgtataacccatcagatctacaccatcttcctctaccgcctttttcatttctgaaatgtggtgctgcagatattccacacggtatggatcgtggatgcttccatcctcttctaaagtatcatatgctccaaatccattttctacgataaacaatggtactttgtagcgatctgtaaaccagttcaatgaatagcgcagtccaatcggatcaatctgccatccccattcacttgcctttacatactggttctttatacgatccttttctccacggtaatcatattccggattgtctggttctgcttttgtacagaaagacatataataactgaaaccaatgtaatcgacacagccctgttttaacactgcaagatcttcttctgttacgtcaatcttaaggtcttttctttcccagtatttcaaaatatttacagggtattctccttttacatgcacatctgtataataatatcttttctgcatggctttttcagcctgcagtatatcttccggacggcaggtagccggatagatcgggcacattgcgatcatgcagccaatctgaaattccggattgatcttatgtcctgcttttatcacttcggcactggcaaccagttcgtagtgagatgcctgatacatcaattcttctacattttcttctggtttaactacaatcccggaattagcgtaaagcatgaatccgtcaccgatatctgcctgattattaatctcattaaatgtcatccagtattttactttgtctttgtatcgctcaaagcatgttactgcaaatttcacgaagaaatcaatcagttttctgtttctccatccaccgtactcttgtacaagatgcagaggcatctcaaaatgactcagtgtgatcactggttcgatcccatatttcagacactcatcaaacatgtcatcatagaattttaatccggcttcattcggctgttcttcatcgccatttgggaagatacgtgtccatgcaatacttgtacggaaacacttgaatcccatttccgcaaataagcggatatcttctttatagtaatcataaaaatcgattgcttcatgattcggataattctcgccttttagtatttcacctgttattcttcttcttgtatttacatctccgctggttacaacgtccataatgctcaagccttttccatctcgatcataggcaccttccagctgatgagcagcaactgcgccgccccagagaaaatcttttcgaaatcccattgttatttccttcctgttgtcttaattgctttgtataatagtgttgggggcttttgcccccaacttttctgtttctatattcaattacatcttgatgattatttctcatcaattctcttatacagtacaatgaattcatctgcgagaatacggaaactctctgcactcataagctgatcttctgcatgcatcagaagcatgtatccattagaaatctctccgtttgcatccattgtcagaaggtctgcatgagcgttatgcccaagtgaaaaggcttcatctccttgtttgatcagctctgctgcctcatcatattttccctctttcgcacaatggattgcattgataaaatgtgttcttgctgtacctacatatgtaataatctgaaaacatgccaattcaaatttttcgtccatttttgtctcctgtcctgcttttattatttttaaattctgattttaccagtcttcatcctcatcttctactggctgattcttctcctgaaccagattcatcttgtcaaccttcttaatgaatggcagataaacaaagaatgaaacacaaaggattactaactgaagcaaagcacttttccatcctgctaaaaggaatcctgagataatcggtggacaagtccatgggatctgtgttgctccatataatgggcagattcctgtatacagtgcaaaatactggattaaacatgcgatcacaggcattccaataaacggaattgcaagcattgggttcataacgatcggagtaccaaacagaactggctcattgattccaaataatgccggaataattcccactttaccaagtgctttcaactgttttgattttgcaaagaagaacatatacattacaagtccgattgtgatacctgcacctgttatattgataaactgatcataaaactgctgtgttacaatatggcctccgtttgctattgtaagttctacaccactgtcaataatagcctggtttgcaagactgtttgcctgtaaaagtcctgtcatgattccaccaactactgttgaaccatgaactccgaagaaccacaggaatggtcctgtaaagcacatcagaactgctccaccaagggagtctgtcattttctgaagtggtgtctgaacaactttgtaaataatttccatacctgttgtgttgaatccaatagaacagataccgtgaattactgcagtccctgtcaggattacgaatgccgggattaatgctgagaatgcatttgttacaccttccggaactccggccggcattttaatacgtatatttttcttcaaaaaccagcagtaaacaagcggtacgatcaatccgacaatgattgctccaatcattccctgtcctgctgtccatgtcttatcaatgattccaccaacaacttctccactttctgttgttttggacgaaggcatcagaatcaagaatgatgccaatgaaataattgcacagttgagtggttcctgattttccagtttcgcatagctatagctgataccgataactgcgatcatcgcactgatggagaatgttgcgccacatgcctgatctaatactgctttgattcctgtagactctaatacatcgacaactgcctttatcggaaagtttgacaggatcaggaagattgatccgatgatcagaggagacatggaagtcaccataccattttttattgactgtattccctttgtattaataaacttaaggatcacagggattactttttcgttaaatttctctttcatttgctgctaccctttgctctgtttttttgctttaaattgtgtatctttgttttctcttatttatttttcgcaagcttatatgcaaatttcaaaacattcattccattgcacattccataatcctgcattgggatcacatctaccggaaccccttttggatcacagatctcttttgctctggcaagctgatatcctacctgtggtccgagcagtgctacatccacgccttcaatcatgcgttccatatctgtaaatggatatgctgcgatgtcagcatcttttcctttttcctttgctgcctcttccatcttttttaccagaagacttgttgacattcctgctgcacaaaataatcgaattaccatgattgtttcctccttaattttttcccatttgttttgatggtgctagtataacaggcattttccattttgtcagtactttttcctgtttctggtttccgttccatatagacggaatttgttacataaaaaaaacagggcattctactttattgtgtaaaatgcactgttttccttttccttttttgtatattatgatactttttcgtgtatcctgttttttttgttacttatctggttactattcgtaccattacattctacacccttaatgaaataagtcttccatatcattttgaaacagatcatctgtatcgttatggacgccctccaattctcttccgattaattccaaaataaaaacgactgccatttgggatgtcagatcataattttcgtcttttttatactctgaaatataataatttatattgcagtcactcatcttcgccaaagaacagtttgccttatttgtaatagatatcaggctgctccctcttcttttcagcttttctgccagcatcagtgtctgctctgtctctcctgatacagacaatgcaaccgtagctgtcctctcaccttttccgcgaaataccggagtaaatggatcatcaattgcaaaagaaaaccaacctacattattaaaatatcttgctccatactttcctataatagaagaatttcccactcctacaaatataattgacgatgcctttgtaagtaacttcacagcttcctggatattctcagcaaatgcctgtgtctgcaccctctcaaagaaatctttaaccgcagtaagatccatattgattttcttctgttctttgctgttgacttcctgttttaatttcaaacgaaattcagaatatccctcgcatcctacctttttacaaaagcgaaggatcgttgttgtcgaaacatgaacctcctctgccagttcacgtactttcatatatactactttctcttcattgctgataatataattatatacatccatctccaactgattaaaagactttatcatctcatgcgtaaacatatgaattcagttcccttctattttttctctctattccattcttctgattattcactcaacaactggcttgcttccttccagcactgccgtcctgctgccaggatggaacacggctgatccaacgtgatcattccaccctctgctgttgagataaaccctccggcttccatcacgatcagtgatgctgccgcataatcccacggatacagcattagttcaagatagactccatttgcaccggatgccacacggcagatatcaagtgctgcagaaccaccggcacgaattccaaggctgttcagatacagcttcttcgcatggtcaaagattctgtctgtatcttctgtctgataccgtgcagttccgaatgcaaccagattatctgcaagtcctttatccgaacagtgaatctcttttccgttcagcttcgccccttcacctttcacagcggaatacatttctcttgtgtaagggttgtaaacacagccaaacagcattcttccaaactttgtcaatccgactgaaatgcaactatgcttgtaatcaaaaataaagttcgtcgttccgtcaatcggatctataatgaaacaatagccatctccaagttcctgctgcatcccgtcttcctctgcaagaaatgtcgcttccggtataagctgacgcaggttctgaatcagataaaactgaatctccttgtcatgctttgtcacaaagtttgcggttccttctttatcaaaaactgtcagttcctcgtcctgtgcctgaagcatcagttcccctgccagtgtcactatcttcatgatttcatcgtataacatgttggttgtagtcctttcctgttttcaagaatgctatttaatcaatgcgtttcctttttattcatacaatcttacagattccatttttcgataatacagctatgttttttcgtctttttatcgtaattaatacctgctaagagcaaatcaccttgataatctttcagtgcatctatatattctttatttttaatctgctgtatcgcaccttctgcacttttatcccacttcagttcaatcataacagctggtttatcaagatgaatttttcttggtatcatacaaatatccgcaaatcctctaccacctggcatttctctaataatagtataatattctcttgcaaagtaaaatgccagattaactgcacagcttaatgagttctcatcattgtactccaatattgaaatctctttatgagcctgttcaattccatttgcaaccttttcgctatccatatcccacaatgcttccaacaattttctagaagcatttattgaccgaattacttctgtccaatccattgtactgattgcatttacgtattcctgagacacttctctatttgggatttcaactgtttctttctcattatcataggtcagatatcccaagtgtaccaacaaggtcaatacatcatcttttgttgcaaatgttgtcatatcattgctgaatgttcctgtattgatgcgtgcgctttctcctgcaagcatttcaataatgatatctttcaatccatccatgttcatctgaatatatactttgagtgcttcgtacgtctctgtctgattccaatatgttccgaattttctcttctgcatggcttctactacagatttcggactatacatggaatgaacttttcgcactccatcttcgtgtgaaatcaaatgatacccattgtaccacgcacttgcttcttcaaaactcatttcatattttttgcataaaatttcaacttctgtttctgtaaaaccaaagtactctgccagatcgcccggatctgtcatggaatattctgtgaacatattgagtgcggagtgagaaccatattttttgattggaagaattcctgtcatataagccaacgccacatactctttatctttcaaccagaatcttaaaaaatccagatattttttctgcgcttcctgatcttgctgatattctcgaaacagacagtcccactcatcaattaatattacaaaaggatgttttgtataactataaacatctttcattacctgaaccagattgttttcgtcacggaatcgtacctgtccatactgttctttcaggtcaaagaggaggtaatcatttaacattcgaagcatctgatctatattttcggttgcactaaggaattcctgcatatttattttcaaaacatcatattgattcaaatgtttttcatattctttcgtgctgctgatttttaattcttgaaacaattcctttgtatctacacttctgtcataataagccgcaagcatatcaacacccatagattttccgaatcttcttggtctgctcacgcaaatatatctctgtaatgttcgcacacagcgatttgttttttctatcaatccgcttttatcaacaaatatctgtgatctcaaagccatttcaaaaagatcacttcctggattcagataacctcccatacttctgacaacctccatttttctatacagtccgtttcatgtgcttctatcttatcatgattttcctcattaatctatagatatccggggcaaaaggtcagacaaaaaaatcgagaatgtatccccatacactctcgatttcgcatcaccattcttcttttttctaaaaatctgtcgtgcaccgcttcacgatctcgcaaggcacaactacatttttctcaatctcttcctgcttctccagaaggctgatcatatgatctacagttgtcttgcaaagcacattaagcttactgtccacggaagtcagctccggttcgctactgattgccataatggaatcattgtatccactgatcgatagtttttccggaacggagatagctttcaccttcgcatatttcactgctccgactgccatcgcatcgtctgttgcaagtactccgtcaaactccagagttctgctgtattctaagaggagattcttcgtatattcaatgtcattcttcgtgcggaatttcaattcgcctctgatcggatatcctgcgtctgcaagtgcagcctcatatcctttcatcttctggcgtccgctgaaggaatctgaatcatacatgaagaggattctctctcttcctctgcgaatcatggactttgtcacttcataagttgcatgataatcatctgcgcaggcgcaatagatatttttgccacacactctaccgttgatgataaagattggtgtctgttctgcggcttctctgatgtaatctgtgtcatcctcgtcttttccattccctgcataagtggaacctacaagtacgagggtgtcaatcttctttgacaataacagattcacgtaattttctttctctttctgcttgaatccactgcagccgaggatacagtcgtatccgtattcatgtaaacggctttctaaataagaaacagctttagacatgtaactgtctgaaatatccggacaaatgattcccactgtcttcattgatccaagtccaagacctctcgcgaagacattcggcgtgtaatcattctcctccatgacagccaacactttctgttttgttttctcgcttactctcgggcttccattgaccactctggacacagttgcaatggacacaccagaaagcttcgctatatcatatatgttaatcgtcgtgccctctctttctaatttctgtcatccatgaatggtttttcctttcacaagcgactctacagataaattttaacgcaaatttctcgttatttcaacctcgaaactattccacatcaaatccaaagtatttcactgcattatcataggaaataccttttacaatcttctcaagtaccttatagtcagccgggtactctccgttctctacccatcctccgatgagttcacagaggattcttctgaagtactcatgtcttgtataagacaggaaacttctggagtctgtcagcatacctacgaaattagacagaagccccaggtttgcaagggatgtcatctgagcgatcatacctgtcttgtgatcgttgaaccaccatgcgcttccctgctggatcttgcctgctgcctctgttccctggaagcatccgagaattgttccgattgcttcgttatcacatggattcagagaatacaggatggtcttcggaagctcatctgttgcgatcagtgagttaaggaaatctgctgtctgtgcacttggagcatagttgttgatacagtcgaatcctgtatccggtccgagctttgcatacatcagggcattgttatcacgcttgcagccgtaatggatctgcattacccagttctttttgtggtaagctctggcaacaaactgcatgaatgccatcttgaacttcatttcctcttctcttgatacaccttcgccagcgagtgctttcttgaagatcgcatctacttcttcctcagaagctggtgcatacattacatattccagagcatggtcagacacacaacatcccatagaatcaaagaaatccattctgttcaggattgcttctttcatggttgcgaagtcttttacttcaattccgcttacttctgaaagtgtcttaatgtaatcagcatattccggtttctcaaggttcattgccttgtccggacgccatgcaggaagtacttttacttcaaatgtctcatcctctgccagtttcttatgccattcaagagaatctaccggatcatctgttgtacaaatcaattttacattagactgacggatcagatttcttacagacattccatcttcctgcaactttgcgttgcacaggttccatacttcctctgctgtctcgccacacagatgtcctgtatatccgaaatatctctgcagctctaagtggctccaatgatacagcgggtttccgattgctttctcaagtgtctctgcccatttctggaatttttcacggtcgcttgcgccacctgtaatataatattcatccacaccgttagaacgcatctgacgccatttataatgatctccgccaagccatacctgtgtaatattctcaaattttctatcctctgcaatttcctgcggattgatatgacaatgataatctacgattggcatattttctgcgtactcgtggaaaagtttctgtgatgtctctgatgataataaaaagtctttgtccataaatgctttcatcttactattctccatttctaactcttattaattgtagtttaaagagcgcacatagaattgttgcgcgctctttgtgtgtatcaaaacaggcggattctttagatatatccgagtagttttggaagtgtcaggctgagtgccggaatgtatgttaccagcagcagtacgataaagattgctgcgaaatatacgagcagctgtttaaatacggtttcgatcttaacgcctccgactttaacaccaacgaagagtgttgttccaaccggtggagtgattgttccgatacacaggttgaagatcatcatgattccgaagtggatcgtgttcattccgagtgctgtacataccggaagaaagattggtgtaaagatcaggcaggctggtgtcatatccatgaatgttccaactacaagaaggatgacattgatcagaaggaagatgacatatttgttgctgctgattgcaagaagtcctgcagatacgattgccggaatatttgtaaatgccataacccatgacatgatactggatactccaatcaggaagatgatgattcctgtcatctctgcactgtccttgaaaatcttcggaagctctttgatcttgattgatttatacacaaacagagaaagacacaggctgtatactactgccactacagatccttctgttgctgtgaacacaccaaagatgattcccccgataacgattacgatcagaagcagacatgggagtgcctgaaggattacatttcctgcttctttggctgtgaattttgtctttgcgcggtagcctctcttcttggcaatgaaatagactacgagcatacatgcaagtccccagaggattcccgggatatatcctgccatgaaaagtgctgctacagaagttcctccacttacaagtgagaatgtgatcattacgttacttggtggaatcaaaagtcctgtcggtgctgttgcgatattaactgctgctgagaagttcgggtcatatccttcttctttctcgattggtccgatgatagatcccatagcggatgctgcggctgtaccggaaccggagatggaaccaaagagcatgttggcgagaacatttgtctgggccagtgctccaggtgcacggcctgtgataagttttgcaaggttgatcaggcggactgcgataccacctttattcataatatttcctgcaaggatgaaaaacggaatagccagcagactgaatacggagattccggagaaaattctctgggatcctgtcagaacggctacatctacatccatgaccggaagaattgcacatacagaagatactccaagcgctactgcgatcggcactcctgcaatcagcatgattacaagaaggactaaaataattaatcctgacaatactgctatattcatcttctaattcccccctattcctctattttctgtacataatttcctgtacacatatctgcaatgttaagaagtccgtagactgcaatcagaactccactgatcggcataactgcgtagatcacacccatggatactccaagagatgctgttttctgtgtcattgtcagattcatgattgtaacaccaccgtagatcaatactgctgctgcgaagaaaacgattagtacttcgatcacgatatcaagcactcttctctttccttccggaagcttgtctactaagaaactcattttcatgtggtctctcttaccgaatacataagcggaagcaagcattgccatccatgcaaatgtatatgtaagaagctcttctgatacagtacttggtttgttgaatatgaatcttgttacgatctgatatgttccaacgactaccatcattgcaaacagcagtacacaggctgagcttaagactgtatcaataccttttctgatcttatgtaatgcttccatcttacttcgcctcctttgtctctgctgtatcagatgaatctgatgtattcgcatatttttcattgtacatctggatgtggtcatacagattctggatatccgggttcgcatcaagcatctcctgctgtacattgcttaccttatctttaaacaggttgatgtccgggtaaatgaattcaacgcccatatcgtcctgtgcaatcttcttagcctgctctacctgagtatcccatgcttccatctctgtctctgttgcctgctgtgccgcatcatagaagatctctttctcttcatcgttcagtccgttgaggaacttcaggtttgcgatcagaacatcaggaataatctggtgcattgtataagaataatatttggcaacctcaccgtgtttgttctctgtcagagccagctcattgttctccgctccgtcgataactccctgttggatcgctgtgtatacttcaccgaaactcatcggagaagcggctgcgccaaatgcattcgccatctttacactggccggactctgctgaacacgcatcttcagacctttcaggtcatccggtgtgttgattggtttctttgcatagaagtttcttgatccaacgttgaaccatgtcataacacgaagtcctgtatcatctgtagactcataaaccttttccatataatcggtatcattcattgatgcgaaataagcttcttctgatgtaaagaggtatggcatactgaatacttcatatacatctgcaaagatctcaaggtttggcgtacctgctactacgaagtcgatcgcacctgtctgcgtcagctcgattgcttttgtctgtccaccaaggagctcgtttggataaatctgaacttcatatttatctccaagtttttcctctacaacttctttaaacttttccattcctgtatactccggatgtgtctctgactgggacagagcaacacgaatgattcgttttcccccattgatatcccctgttccgctgcatcctcctgccagaccggcaacaagacctgcacagagaacagtgctgataatttttttaatcctgtttctcatattcttttcctttattcattgaatccccggcgatcgaactgtctgttctttttatagaaatattctggaagtaacgcattccatattgcattaagatgttagtgcttcctcctggttttccttgttcgccgcatttacaccgtttcttgtgtaagctcttacatttataaattaagtataacgtgcattgtactcgattgcaaacaatttctcgtttattttttcacaatttttattctttgtttttgtagctttttcacaaaatttgttgttttcccatttttatattgacctttttctgatttcggtttactttttatgtaagctcttacataatctgtaagcaattacattttaaaacattacatttataaaaagaagtttctattgatacacattggaaggaggatcaatcgacctttgaaaccatttattaaaatccatcctgctgataaagtcgcagttgcactgtctcctcttaagaaaggaacagagatccagctcgacggtcagacagtaatattaacagaagacatcccacagggacataaatttgctttaactgatatcgccgaaggtgaatccgttattaaatatggaaatcccatcggagttgcaaagacagatatcgcaaagggctcctggatccatactcacaatatgaaaacaggacttggtgaccttcttacatatacttataataaagaaactactcctctcgctgagaaggaagcacgtttcttcaacggttacagaagaaaggacggacgcgtcggtgttcgtaatgagatctggatcgttccgactgtcggatgtgtcaacaatgtggcacaggcaatcgagaaaggttcccagcgctttgtaactgagaatgtagaaggtgtgatcgcattcactcatccatatggatgttcccagatgggtgacgatcaggagcacacacgtcagattctggcagacctggtcaaccatccaaatgccggtggtgttcttgttctcggacttggctgtgaaaacagtaacattgatgaactgaagaaatacataggagaatatgatccggaacgtgtgcgttttcttgttgcgcaggaatgtgaagatgagattgcagacggaatcgaggttgtacgtgagcttgccgcttacgcagaacagttccacagagaaccgatcagctgcagtgaacttgtaattggtatgaaatgtggtggttctgacggactttccggtattacagcgaacccgactgttggtggattttctgaccgtctgatcgccatgggcggttccacaatccttacagaagttcctgagatgttcggagctgagacgttacttatgaaccgttgtgagaacgaagctcttttcgataagacagttactctgatcaatgacttcaaagaatactttaaacgtcacggacagacaatctatgagaacccgtctcctggaaataagaagggtggaatctccacactggaagacaagtctcttggatgtacacagaagtccggtacagctcctgtcaaaggtgtccttgcttacggcgaaccagtctgtacaaagggactcaaccttttaagcgcacctggaaatgatctggttgccgcaactgcactggctgcatccggtgcgcacatcgtcctctttactacaggacgaggaacaccattcgcatgcccggtaccgactgtaaagatttctacaaacaatcttctcgctgagaagaaaaagaactggattgacttcaactgtggtgtcctcgttgatgacacaccggcggatgaacttgcagatcagctgcttgacttcgtcattaatatcgcatccggtaagaaatcaaaatctgaagaagctggtttccatgacatggcgatctttaaacaaggtgtaacactttaagaatcattgatatatattttatggaaaggacgatacaattatgaaaaagctttcttatgaaactttaaaagaacagaattattccggatatcttctggaaaatgcaccggaacgtgtgcttcagtttggtgaaggtaacttccttcgtgcattcgttgactactttattgatgttatgaatgaaaaggcaggattcaactccaaggttgttctctgccagccgatcggaccaggtcttgccgacatgatcaatgagcaggaaggactttacacactcttcttaagaggattccaggacggaaaggaagtaaataagaaacgtatcatttcctgcgtaagccgttgcctgaacccatatgctgatttcgaagctgttcttgagtgtgcttctaacccggatttaagattcattacatgtaacacaaccgaggctggaatcgcttacgatccatcctgccagttcacagatgttccggcaaactcttaccctggaaagctgacacagttcttatatcgccgtttccagaaatttggtcaggaagaaggaaaaggattcatcattctttcctgtgagctgattgataataacggaaaagaacttgagaagtgtgttctgaaatatgcagagcagtggaacctcagtgaggacttctgtgcatgggttaagaaggaaaatactttctgctccacactggttgaccgtatcgtaacaggatatccaagaaatgaagccgctgcaatctgtgaagaactcggatatgaagacaacctgattgacacaggagaaattttcggattctgggtaattgaaggaccacagtctatcaaagatgaattcccggtagacaaagcggaacttccgatcctgatcacagacaaccataaaccatacaaacagcgtaaagtacgtattctgaacggagctcatacttctttcgttcttggtgcttaccttgcaggacaggacatcgtaagagactgtatgcatgatgatgtaatctgcggattcatgaacaagacaatctatgatgagatcatcccgacactggatcttccaaaggaagagctgcttgacttcgctgctgctgtaacagaacgtttcaaaaacccattcattgaccacgcattacttgccatctcactgaactctacttccaaatggaaagcccgtgtaatgccatcactgaaagagtacatcaaacgtaaaggaactcttcctgaatgcatcacagcttcctttgctttctacattgcattcttcaatggtcacactctgacagacgaaggtcttgtagcaagcagaaaaggaaatgattacactgtaaaagatgacaaagaagttcttgaattctaccttgcacacaaggatgattctgtagaagctcttgttcacgcagtatgcacaaacaaagctttctggggtgaagacctgacacaacttgaaggattcgagagtgctgtatgcaattacctgacacagatccgcgaagaaggaacctatgctgtaatgaaatctcttttaaaggaggcgaactagaatgaacgctacattagaaaaactttcacagttcggtattgtaccggttgttgttcttgatgatgcgaaagacgcagctccgcttgcaaaagctctttgcgacggcggactggcttgtgcggaagtaacattccgcacagccgctgctgaagaatccatccgcatcatggcaacagaacatcctgagatggttgtcggagccggaacagttcttacaacagagcaggttgaccgtgcagtaaatgccggagcaaaattcatcgtaagcccgggacttaacccaaaggtagtaaaatattgtcttgaaaagggaatccctgttacacctggtgttgtaacacctagcgaaatggagcaggcaatcgagcttggtcttgaagcagttaaattcttcccggctgagccatccggtggacttaacatgatcaaagctgttgcagcgccttatacaatgctgaagttcatgccaacaggcggacttaaccctcagaatgtcacatcttaccttcagtatgataaaatcttcgcctgcggcggaagctggatggtaaaaggaaacctcgtaaaagagggtgcttttgatgagatcacaagacttacaaaagaagctgtagaacttgttcgcactgcacgggaggtgtaagccatggcaaaagttgtcacattaggagaaatcatgctccgtctctccccaccgggatatcagcgttttgctcaggcatccgacttcgagatcaattatggcggtgctgaggcaaatgtagctgcttccctcgcccagttcggcaatgatgcggcattcgtttccaaggttcctgccaatgccattggagacgctgctgtcgcaacactgcgtaagctcggcgtagactgcagccatatcgtgagaggaggtaatcgtcttggaatctatttcctggaaaacggtgcttccgtccgcccgtcaagcgttgtctatgacagagcggattccgcgatcacaaaagcaactgccgatgaatttgatttcgatgcgatcatggaaggggctgatctcttccatgtatccggaatcactcctgtcctgagtaaagcagctgcagaacttacaatgactgcactaaaaaaagcaaaagagcacggagtaactgtttccttcgacctgaactaccgtgcaaaactctggacagaagatatcgaaggaaaacagaaaatgctctctgagatgatgccatatgttgatatctgcttcggaaatgcaagagatgctgccaaatgtcttggatattccgaggaaggtgttgacttcatcaatggagactatcagatctgtgtcgatgaagaacacatgacccatgttctgaaccactacggattcactcatctgatcacaactctccgtaagagtatcagcgcatccgacaatggctggtccggtgctgtctgcacagcagacggactgtaccacggacgcaattacgatcttcacatcgtagaccgcgtcggcggaggagattccttcgcttccggatgcctgcacggtatccttgcacagatgggtgccgaaaaagccttagagttcggtcttgccgcagctgcgatcaagcacacgattccgggagacctgaactttatctctgaaacagaagtattaaatctcatggacagcgacggtgccggtcgcgtgcagagataactcagaatgtgtcaaggcacattctgacccttatgccggccgcaaaaagccatggttctgtggtcggcattttcatcaaatataaaccaaaatattaacttgccaacaaccattaaaaacatataaacatttttcctaaaatttttaaatataactataagaaaccgcacactataacagatgaacgtatcaagatttgttctcctgttatagtgtgcggttctttttggggtcttaactggcctattttgcttatttcatcgcgtctttaatcgctgtcagaagctcatcataagtctcatatgccggaagttccggatgatctgctttgatctgctctgtgctgcggaacaagaatcccgccttacttgcctggatcatgccaaggtcattgtaggaatctccgcttgcgatcgtgtcgaatccgatagactgcagtgctttcacagtactcagtttagactgctctacgcgcatcttgaatcctgtgatctcgccgtcctctgctacttccagactgttgcagaacagtgtcggccagcccagcttctccatcagcggtgtggcaaactgtgtaaatgtatcactgatcaggattacctgactgaatgtgcggagctcatctaagaactctctcgctcccggaagcggatcgatctttgcgattgtctcctggatctctttcagtccgagaccatgctctttcagaattccaagtctccaattcatcagtttatcatagtcaggttcgtctcttgttgtcttcttgagttccggaattccactcgcctctgcgaatgcaatccagatctccggtacaagtactccctctacatcaagacatgttatatacatcgtaatattcctccatctgtttcgttctctaatcactttattactttactgtaatgtattgattttaacatatatgctacatatttactacttatttttttacgacattgaaaaaggagaccagatatctgatcccctttcccatcttctattactccataataggcttcagtgcttctgcaagcttctctttctcagcttctgcctctgcaagatctttaccaagtgttgtgtagtagatcttgatcttcggctctgttccggatggacgaacgattactgtctcgttgttctccagtttgtaaacaagtacgttagccttcggaagtcctgtttcttctgtcttctcgtaatcgatcacgctggctactttgtatcctgcgatctcttccagaggattcttacgaagattttccatgattcctgacatcttatccattccgctcagtcccgggaattcaaagctatcgatcttgttgagataacgtccgtactgtgcgtagatctcttccagtctctgtttcagtgagcttccgatgcttctgtagtaagcggccatctcacagatcagcatagatccgatgattgcatctttatcacgtacataaggtcctgcaaggtatccgtagctctcttcaaatccgaagataaaacggtcaacttctcctgctgcctcgaggttcgcaatctgatctccgatccatttgaatcctgtcagtacgttgcgaagttctactccgtaatgctctgcaactgcatctgcaagtggtgtagatacgagagatttcactgctaccggtttctcaggcattgtgcctttctcgatacgtcctgctgcgatgtagtcaagaagaagaactccgacttcatttcctgaaacaagctcataggatccgtccgggcacttcatagcgattcctacacggtctgcatctgggtctgttgcaagcatgaggtctgcgcctgtctctttcgcaagattcagtcccagctcaagtgctgcaaagatctctgggttcgggtagctgcatgttgtgaaatatccattcgggtactcctgctccggtacgattgttacatctgtgattccgatgtctttaagtacacgtgttaccggtactaatccagatccattcagtgggctgtatacaagcttcagtcctgcactcttacacagacccggacgaacctgacgggactcgattgcctcatacagtgcatccttacagtcatctcctacgaaacggatcagaccttcttcaactccctgagcgaaagacatatacttcgcacctgtaagtacatctgtcttctggatctcttcgtatacgattgctgctgcatcatctgtcatctggcatccatccggtccgtatgccttatatccgttatacttcgccgggttgtgggatgctgttaccataacacctgcgttacagttataatagcgtgttgcaaaggaaagtgccggtactggcatcagagcatcgtagattcttactttaattccgttcgctgcaagaactcctgctgctgtcttcgcaaacacatcactcttgagtcggctgtcgtagctgatcgctactgtctgtgtaccgccctgtgtctttacccagttagcgagtccctgtgtagcctgacgaacaacatagatattcattctgtttgttcctgctccaagtacaccacgaagtccggctgttccaaacttcagcgcaactgcgaaacgctccttgatctcgtcatcatttccctcgattttagttaactccggcatcagatctgcgtcttctaaatctgctgccatccagcgcttatactcttcctgatacatcttaatcactcctattattttcttaaaatgtaaaattattgcaattcagccatacaacgtaagaccgtcagtttatgaccacttcgttgtatggctgaactgtttctaaactttacaagtctagtcatattataccatgcaggtagatttacagcaagattacttgtctattttaacaagcattttccattacatagaaataattcccaatacatttgcaatagaacttaataatataataatcaggcagatcggtgccagatatttcataaagaacatgtataatttctttctcttaaatgcagatgactgctcaatctcccttgcaatcttgtcaaatccaacggtacgaacgatcaagaagcatgttgcaagtgctgcaagtggcatcatcacggaatttgtcaggaagtcaaagaagtccagacatgccattccgaaaatctgaataaagctcaatactccatatcccatagaagataaggttcggattataagcataacagcagccataaggatacagcatttcggtctgctccagtgaagttcatcctggaatgtagatacgcttgtctccagaagtgagattgcacttgtcactgctgcaagaagtaccaatatgaagaacaggataccagccagccttccaacgcccatacttgcgaataccttcggaagtgtgatgaacatcagagatggtcctgcctgcagattgtccgggtttccaccagagaatgcaaatacagccggaatgatcataagtcctgcgagcattgcgattgctgtatcgaaaatctcaacctgtgttgtactcttctcaagatcaacgtctttaccaatataagaaccatatgtatacaaaattcccatcgcgattgacagggagtagaacatctgtcccattgccgcaacaaccgtcattgctgagaagtgctttggattcggaatcaggaaatacttcacaccttcaattgctcccggtcttgttacagaataaattgctacaataaccgcaaggataacaaggattggcatcataatcttagatactcgctctataccattctcaactcctgccaggataacacagaatacaagaatagcaaacacgatgaaccatgcttctacctgaaaagaatctgaaataaattctgtaaaatatccatcctgtgcgacagtctgcacatttcctttcaaatactctgcaaggtacttgataacccagccaccgatcgaactataatacggcacgatcagcatagggattattgcattgagccatccgccgatcttaaatgattttgtcttaccaaatgtctgaaaagctccaaccgggctttttcttgtcattcttccaagtgctgtctctgacatgatcagaacatatccaaaagatacggtcagaaccagataaacaagaaggaagattccccctccatatttcgcagccagatacgggaatctccagatatttcccaggcctactgctgagcctgcaacagcaagcacatatccgattttacccgagaagcttgctctctttgctgattgtccattgttactcataaattgcctcccatcacataacagtctgtactgctattttcccatcttttttatagcctatactgttctattctaccattcacaatcatgaatagcaacaaaaaagagcgttgacagcgctttttaaaacacatttaaaatgctatctcagctcatttttatacgtttttataatttcccttctatttctgctctttcaagcaatctctcaatccctatattccatgttccgatcttcactccggcattgatcacacgcttacatttccctattgtctcaaatgctttctgaagcgtttcttcccgaatctcctcaaacggttcttccgtgatcacttctgccgcaagtaatcttgccagccggtaatccatatcattttcatataaaatacctgccgcaaacgggatgtgctccttctgaagtcttcgataaaccgggattccagttccgccggaagagatcacgaacacttccggctcaccctccggcgcaggaagttcaatacttccaaaaagcgggtcaaaatatccattattgattccatacaattcgcgaatgatttcttctgtaaatacttcttccggacttccgtaatgtgaaatcgtctcgcctttgacacagatgatcttatctgaaatcttctgtgccagatcgatttcatgaagagacataatcaccgtaatcttcttctgccttgccatccgctcaaggatagacaacagctccaacttatattttacatccaggaatgaagtcggctcatctaaaacgatcacatccgggtcctgacagattgctctcgccagcagaacgcgctgcttctgtccgtcactaatcgcattaaaatcacggttgccgagttcctgcgcatgcaccgcctgcatcgcctcttccaccagacattcatcttcctgtgtcagaatcccaagtcgtcctgtgtaaggatagcgtccggtcgccacaatgtcatgacaagtcatcaactctgtcttgatccgatccgtcaacacgaccgccatcttagacgcaagctttttgtacggcagtttcaggagagaagtatcgtcaaaaaatacatttcctccaacgactttcagctgtcttgtaatacttttcaaaatcgttgactttcccgaaccattcgggccgatcaaagtcacgatctcccccttgttgatcccgatattaatatcacggatcagggagtttccattataacctaccgacaggtctttcatttgaaaataataatctgccatcttattttcttcctcccttcggtatcatcatatagataacgatcggtgcacccagaatagaagtcaccgtactgatattcaattccaccggtgccagtgccattcgtgcgatcaagtcacagatcatacagaacacagctcccataaagaacgttcccggtatgaccacgatcggttttgacgttccaaatgccttccttgcaagaaacggaactgcgattcccacgaaggaaatcggtcccgcaaatgctgtcacacacgctgacagaatactggaaagcaagatcaaaatcacgcgaaacgtcttgatgttgactcccatactctgcgcatatgcttctcccaactgatatgcactgattggtttggacaggaaaaatgtaaacagcaccgcaagtccgacaaccactgctgccacacgaatattgctccaactcattccggaaaaacttccctgtgaccacccgtgcagattcacaatatcagaatcatccgcaaatgtcacaacaaaatccgtgatagccgaacagatatatccgatcatgatccccccgacaagaagagacgccatatgctgcacttttttcgacatcagaaggataaatcccgtcgagatcagcgacccgataaatgctgcaagaatcagtgtatacgaagaaaatcttccgatatatttcaaatacacgatcattgtaagtgccacgaccattttcgctccggaagaaattccgagaacgaaaggtccggcaataggattggaaaaaaatgtctgcagcaaaaaacctgaaagagacaatgcaccaccaagcaatgctgccatcagaattctcggaagacggatcttccatataatattgtactctgtcgccgctccttctttcagaaagagaatgcgcagaatcttaggcaccggaatatgaacatttccggtattgatatttagcactgtcacaacacaaaatactgctgcaagaatcagaaataccgctgtgtatcttgtacgccgtctgaaattttcctgatgaaaacttgtctgctccattcttctactccatcttttcaagaaatgtcatctgagatgcatcactgtctgtcagcatcagatgcatatctttgatcagctctccgactgtatctgttgcctgatataagttctttccggtataccagacatttccgtctttcaccgccttgaattcagagaacaattcattctttgcttccaactcactgatactatttatctgtccgtcgatcgtcccgttgtagatcagataatctgcatctacagcagtcgcatagaattcctccatcgtcagtttaacagatggtgcgttgctgtccggattcttcagatctttgaacgcatatcttccacctgcgatttcgatcattgacggaatataatcgtcagattttctcacaacaattgaaccatctgtactcacatagaaataagcaaccgtcttttccgtgttctcgaagcctttcagttcctcgattacatgagcctgctggtcaaaaaatgtatccgcttcttcctctttattcagaagcgccccataaagcttgatccactcggttcttccaagcggatgtgactcataactggagtaatctacaaataccggaatcccaagatcttcgatcatttcctgtactttcggtgtatgaaggatcatcgttgattcgattgccagatcacagtctccgtcaacgagagtctcataatccggttcgctgtattttcccgcaaatgtcatcgttccggattccattgcttcctttgcactctctacataccagccggaagcctcaagcccggagaatttcaccttgtcaattccgccgattgcatcaaacagagacatggatgctgtcgccgccatataaatattctctgtcggctgctggatcacaacaatatcatccgccagattttccggttcttcttcaccttccggaacgatcagatattgcttatcttcatggacatcgatcaacttatatccatccttataatagtatacatcgaattctgtcgcgtaagtcagatccattgtagcttcataggtaagcccttcgatctccggtgctttttttgtcttgtcggctgcatctttagtcttatcctttgtcacatctgcacctgctgaattattaccgctgtttccaccggaggctgcggtagaaccgcagcctccgagcagaagtgcagctgaaagcattaacgctgtgattctgcatcttcttatcttcattctatttttctctcctatttctctgccgctgctactgccgcatcaaacttctcgttcgtcagctcttcacatccgtagagaacaccgtaaaccttgatccactcctgctttccaagttctgtcttttcctcggaagaacgatcaacgagtaccggaataccaagtgtcgcaagcttctctgtcaactcctcaaactgctccgtctgctcttccaaagtcaacgtctcttctgtatccttactgtctttcttgtcagtatcttttgcttctacttcggtttcttctgatttcgcacccggaaggatatctcctgtaaacaatgcaagattcacttcactcttcacaaggttcttcaacttcagtttgtccgctgttcctgcatatgcaacttcagcattcttctcaccgtcttttactttcatcttatcagcaatctcggatactgtacagtctttgctcttcattccaactgctgcaacattatcgagaagatctaagtctttcatcatattcagaatctcatcagactctgcataagtatgatctgtcggttttttcacaatgatcatatcctgctcaaggccaaccggaacttccacatcctccggaacgatcagatatttcacaacatttcctttgtaaagctctgctgccagatcctgttcgcttgtgccgttgttatccgaagctgcggattcctcgacagaagcatctgacttgctgtcggtatcagatttcttggtatctgctgactttgcatcctcagatctgttaattgtgacagatgcaacttttttcttagaagatttttctgagtccgaattatccgcttctgatttcttatcctctgctttctccggatctctggctgtatctttcgtcatgtcgatctcaagaagtacgattccctgatcataatgataaatcttgaaatattctgcatagtcaagctttgtctctgactgatattccaaacctatgatttcaggtgcttgttcatccagcttctggttattgcttgttgaagcatctgttccgtttgcagatgttcctccattcgccgctgcaagataaatgaaaatcgtatattctatctcatgtgcgacagacattttatctgtcattccaataatcttattgttctgattcaacgcaaccgggataacagctgtcgctgatccgccgccctttgttgtgtaatacttatttccgttcgctttcacatactgataatgatcactgctgaacacaagcgttgcataagcctgtccattctggatcgtcactttattacaagtaatctgaaccttacctgttccacctgaccaggtaaaacgatctggagtgtatacaccgtctttcagtgttgttccactgtttacatgagaagtagagccacttgtatcagattcgtattttgatacattatctgcttttccgtcgtttccatctgtttttcctgaattagttccaggtacagaaccgcctggaaaaacagaattgtttgttcctgtattacctgtattgttggaaccaccagtagttccggaatttcctgtgtttccggaatcacctttattctcagaatctgtagaattaagatcggcaatcttcttcattgtctctgactggaaagtcagcgttctgtcataccagattccttttttaatggaatatgctgctactgcgatttccttatccaacgcttctaccggaacagtataagtgtattttccttcttcattcacctgatatggaatccaggatgactgatctgcgcttgcagcctcttcctttgttcccatatacagatagccgtaaccggttccgcttaatgtaagcacggcactcatttttccgtcttttgctgtcaggatacaatccactactttaaacatggaagaactggaagttacgtccatactgtagattccgtttgctactgttgcttccggtgtcggagttggagttggctctggattaggcattggattcggtgatggagttggttccggtgatggttctggtgttgatgtttcttctggagttgggatatacatccacagatacatcgtatcataccaagtttgcttttttgatcttctcaaagataccggaattgtctgtcctgcctgcgcctgcggcactttaaaagtaaatgtcattcctccatcttctgtctttgttccttcaattatggaagacttcagaaggtcatctttagagccaagataaagtgcatcataatgtgctttttctgtcttaattgtaatttcaagctcaccatcttttttcgtaactgttgacttgctgaccttgaacattgcgaactcttcggcgttttcttttactaccttcacagattctcctgttacagaaggagcctcctgcagtggcggaagttccggttccggagtattcgtagaatcgttagaatctgtagaagattctgatttacctgtctcatcttttatctgtatatccttattatcagctttttcgtccgcaacctgatctaagacagttgtgcctgaatttttcccagtggtttctatatctttctcttctgagttattttctaagttgttttctgaattattttctgagttattccctaaatttggttttgtttctgcttcgattgaattctgattatctgatttattcgaagaattatcaactttatcagattcctctttctgatcttctttcgttaaatcgtcatttcttttatcttctttaacatttcctgcgtcttctgtctgactctcatcttgtttcttatctggatcagcttcttccacctcaacagttccctgtaaatttgtctcatattgctgctcattttctgccgcatatgttcttgtataagacaatggtgaaatcatcatagaacctgtcagcataagcgcaagccatctgctcttatttttcatttcttttttgtctcctcataagctgtgaattataaaatgcgaaaaatggatagaattaccctgactcgaatgaatgattgctggtcacacgtaatgcgaacagtaagaatggttctttcggtacaatcaattactcgtgatctggaatccttatattccccgcaccagcggccggcaggtttcctgacttacagatcttctatacagaacaccttcccggtctcccagtggatgtgcggactctccacacttgtctgtataggagcggtcttctgaaatctaatttctaagaagaccgcttctctgctcacagtgacgagttcgtacaggtcttgcacctgtttcccttttacctgtttcgatcaggatatggaaatatattccctgatcaaacagcaccgaacgctattatttctgactaactataacatttcattatattgaagtcaactattctgccttcacagcccagcgcatcttcgtggatcttgctcttccgttctgcgcgcattcctgtgctgacggacgtaccacgtctcttgcatattcggaatagattccttctttatatcctgctttgagtgctttctttacaagcttatcctcgcctgaatggaaggtaagaatcgctactcttccacccggtttcaacgctcccggaagcttctccatgaattcgtacagtacttcgaactcattattgacatcaatacgaagtgcctggaatgttctttggcaagtcttcttgataatatccttcttttctttattatttggaaggaaatccaaagtcttctcgatcacatttctaagctttgttgttgtatcgatgcgattgcctctgcgaatctcatttgtaattgctttcgccagttcttcgcagtatggctcgtctgaattttcataaagcattccggcgagttcttcctcggaaatgttatccaggcgctccgccgcgctgatgcctttctcctggttcaatcgcagatccagcggtccgtcaactttgaaggaaaatcctctcttcggattgtcgatctgcatggaggaaactccgaggtccgcaaggataaaatcaaatccgccaacttcttttgcaatctcatcgatcgtgcagaagttctgcagacggatacttaaaatgtcttctccgaacccctgatctgccagacgtttccttgtctttgcagactcttccgggtcaacatctgttgcatagatgtgccccttgcctttcagacactcaagcattgctttcgtatgtccaccgtatccgagtgtcgcatcaaacccagtctcgcccggctggatcttcagaaaatccaggatctcatttaccatgatagaaatgtgcattccggcaggagtgtttcccttctggattacatgcgcgattgtgtcctgatatttctccggctgtaactctttatatttctcctcgaatttcttcgggtattttcctttgtatctcacacgacgcttatgcggtgtctgtgattcctggatattctgattgttctgttcgctcatttctctctccttgtatattcacatatattttctatattattttccagacctgactgtatatttctaagacgcttctctgaaatattctcatttgttctgagaatttccataatcttatccaccgttccatccaacttctgttcatcaaaccaatcgaactgatgaaacaattccaattgtctgtccggactcattccgttatttccaaacggctttgcaacataagaataatctgacggcagttcaagcatctctgccctgcaccagagacaggtcccactgtcaaagattggtgccactcttgtatattctaatgtctcaacattacggattacaccaaaatttctccaatgtctgtcttcatttgcaagaatataatcacagacaaacatctttgtaagcatttcttccgcattttttaatccaagctcctgataaacagataacagaaattggtagtcattcatagaggatggtttcttcttattgcaaagcacatcatatgctgttataagttcctcgttctcgccaagcatatttttacatgcagaatacgttgaccttccttcttggtgcaaaaaatatggaacataatcttctttctctagaagctgttgatgaagcaccgtcgctgcgacctcattctgcacttcctgacggaacaatgcagatcctgtcttcagaagaatccgctcgccatttacaatcttccatttcttgttcaaatctcctcccaaagtggagttcggtgacatgagattcggatgtcctgacgactgctgtccgagtgtcagtattccaagatcatctgtaaaattattatcaaaaaaattgatatctttccactgctgtggtgctgctgtatcattgatccaatagcgatctgacaaagacagtccaaagtttttctctgctaatgcaagagtactgtcgagatccagacaatccaaaacctgttggatctgatttcttgatgccggaattgctcttcccttccaccaggcattcaaggctttcttcgtcacatttcctttttgatctactgttgacggtggcgcataccgagcgtcatgaacttccaggattttcataaccgcatgaacttccagatcataatcaaattctaaaaccggtgtgttcttattcattaaaagatatcgtgccattatgttcctcctgttcttatctttacaacgtatgtacagtataccatgaaagttattcacaatataccatgaactttgaaatgttttccacataagtctgcatatttttcaccttttcacatttctttaccggaacctgcatggattcgctattttatccggctgcatatcttactgccacgttcatcactccggcaagtgccatcacaaccaccggattcaattttgtcttacgaagcagtaacagacagattccaaagatcaccaccatagaccattttgttgcagcaaactgcacaattccatctgcccagaatgcagtgtgcagaattgcgattcctgctgatgcgatcagtgcgacaaccgccggtcgtaatgattccaaaacactctggaacattttcattttcttatatcttaaataaaaccatgcgatcaaagttacgataatgcaggatggcagaatgcacccacaagtcgccgcaatcgatcccggcactcctgagatcttgctgccgacaaatgttgccgcattgatcgcaattggcccaggtgtcatctgggaaatcgtgatcagatctgtgaattctgtcatcgtaagccagccgtgctgtgtcacaacctgttcctggatcagaggcatcgccgcataaccgccgccaaagctgaacagtccaatctgaaggaagcttaaaaataatttcaaataaatcatttctcatcacttcctttcttcgtgatttttttctcaattaatgcgcggagtactccgacaattccacagatcagaatcacatagactacatttaccccaaatacgcaggaagctgtaaatgccccggccataagtacatatgacaaagcatctttcttcttcacgattccggcacccatgtcatatgtcacggatgcgatcacagctcctactccggcttgcattccttcgagcattaagctgatgatctggttatttcgaaatgtctgatagccgacagaaagtattgatataataagaaatggtggaattactgtcccggcaattgctgtcagaatccccgcaattccagccagtttatacccgatcacgattgctccgttcactgcgattgctcccggtgccgactgcgcgatcgccacaagatccaacatttcttcttcctcaatccaatgatattcatctacgaactttttcttcatcaggctgacgatcacataaccaccgccaaatgtgaacgcgcttaagtaaaaggttgaccagaaaatcttccacaattttttatcttgttttttcccttgcgttttttcttgttgttcttccatatatattgtcctcgtatattatgattatgcgaattgcgtagcactagaactcccgccacactatatgctattgacaggcaaaattccctaactatgatattctttctcttgtagtctatcgcaatcaaattgattctgcaatctccttgatttttttcacattatattttcctttttgaaaccttaattttatctgaatttcccctatttggaaaatgattatgatacaatgagaacagtaatatttatcataaaggagattgaaattgaaaaacctattttttcgattctcttatgccgttctcctgtgttgctgcctgaccggatgcggtagcatacagcacaaatccagtacggacacggcgcagggtactaaggcaccacccaagacagcggatgatttttctatctcatcagattctgaaaatgaaactgtagatgaaacttcttctgctgatgccgccaccccatctgcttctgaatctgaatccgtaactcagcaagaatcgctgaccggcgcagcggctctttacagcaatggacaggagatcagctttgacccttcctggcaatacgcagacttttctgcaatcaattctggaacagctactatttatcttgcagattctgaccgcaaggatatcgtcgttggcgtgaatgccggacatggaacttccggtggtgcttctgtaaagacacagtgtcacccggatggttctccaaagacaaccggcggaagcactgctcagggtgcaacttatgcgactgcagtttccgggggaatgacatttaacgatggaactgctgaaagcactgttacacttcagatggctcagattctgaaagataagctgcttgctcaaggatatgatgtccttatggtgagaaatagcgacgatgtccagcttgataatgttgcccgcaccgtactctgtaacaatgtagctgactgtcacatctcactccactgggatggagatggattgggatatgacaaaggctgtttctacatttctgtaccagatggtctgaaaagtatggaacctgtcgcttcccactggcaggaacatgatgcacttggggcctctcttgtagaaggacttcgtacagaaggaatgaccatttaccaaaatggttctatgaatatcgacctgacgcagacttcttatagtacgattccgtctgttgatatggaacttggaaatgcaagctttgaccacagtgattccacactaaacagtctggctgatggtctaactgccggagtcaatgcttattttggaaattagaattcttattgtgatatttattttattttttaaggaggagttttatggagccactcattcgtgttaaaaacatgtacaagatttacaaccctggagaaaatgaagtccgcgcgctggatgatgtttctcttgagatcaaccagggggaatttattgccattgtcgggcattccggttctggtaaatctacatttatgaatatgctcggctgtcttgacacacctgattccggggaatattttctggacggaaaagatgtcgccaatctctcagacaatgaactgtctgatatccgcaatcacaagattggcttcatctttcagggattcaatctgatcccaaacctggatgcacttggaaatgtagaacttccgctgatctaccgtggacttggaaaacaacagagaaaagagattgccggggaagctctatcgaaagttggactggaaaatcgtatggatcacagaccgaaccagctttccggtggacagcagcagcgtgtcgctgtagccagagcaattgccgcacagccgccgatcatccttgccgatgagccgaccggtaacctggacagtaagtcgactatcgagatcatgaatattctgaaagaccttcatgaatctggaagaacagttattattattacacatgatgatgaaattgccaatcaggtagaccgtgttgtccgcattatggatggaaagattgtgagtgatagtgtaaatcagtagcaacttaaatacttacctgcacttaaagagagggcagtactttacgatttctcaatcgttgaagcactgccctctctttatgtttcttattagatatttcttagtagaatttctaattacttctattcactttttattctactgatacaagctcaatcttgaagttcagttcttttcctgccatctcatggtttgcatcgaaagtgattgttgtctcttccttagctgttacctttaccggaaatggctgtccatactgattggacaggtaaacctgctgtcccacttcaaggtcttcagatcccggaagctctgcaatctctactgtaaagatagcttccggattcggcattccgtaagcttcttccggcatcagatggatgtctactacctgaccaacttccatatcagctactgctgcgtcaaatcctttgatcatctgtcctacaccacatacaaactcaagcggctctccacggtcataagaagaatcaaattgagttccgtcattgaatgttcctttgtaatgtgtacggcatttctttccaacattctttccttccattgtagtgtgtgatccgcatccgccaccgcagctgcttccacaagaatgtccctcttcatgatctccgcaggaatgtccttcctcatggtgatgatgatcacatgtagctcctctggatacgagctcacctttcaggtatgcctctactgcctgatctgcatctccctgagcacctgaacacaattcaacaccagcctctgcaagtgctgtctgagctccgccaccgattccaccacagatcagaacatctacgttctgtcctgcaagcagtcctgccagtgctccgtgtccttccccattagaaccgattacttcactggaaaccaccttatcatcttccacttcgtacactttgaaagtctctgtctttccaaaatgctggaaaatatttccgttgtcataagttactgcaattttcattgtaaaatcctccgttttcaagatttcctgtctatctagtataatccattacgcaggtaaaagcaacctttgtgtaaatgtggatagagtacgatagagtacacagtatcattgacacaatcttctcaagacactatacttgttataaaacttactccaaaccatcagaaagtgagcacaaccatggaatatgaacacatcacccattcctttgaaccaatatataatgaagactccgagattctgattcttgggacgcttccttctgtaaaatcccgggaaaataatttctactacggacataaacaaaatcgattctggaaattgttggcgaagctttgtaaagaagaaactccgcagacaattgaggagaaaacttccatgctgctccgtcaccacatcgccatctgggatgtcatccaaagctgcgacatcaaaggctccagtgacagcagtatcaaaaatgtaacgccgaccgatctgaatcagattttaaatcactgtcagattcgacaaatctatgcaaatggaaataaagccggagctctttataagaaatatcagcagccgctgaccgaaagagacatccttgtactcccttccaccagcccggcaaatgccgcctggtcactggagcgtttgtacgaaaaatggcgtgtcattcactaacctgttctcttctctgctcaaacactgctgccagcctcggcagaatcttgttgcaagccatcgtgtaagccgcaccgaatacatttgccccaatacgaagtgcaacagcatacggcatcccgaataagccggatgcaatcgacaatgcaccaaatgtattaaatgctgtctgccatgcataccctgcagaatatccgactccgattcctccgatcattccgatgtatggatacattgactccggaagcaccagatacaggataacaaataacagacatcctactatattgaatgcagctctcttacctgctcgctctccacagtcatccggaaatgggagacaaacagacatgcttgcgattcccgcccacattgctcttggaagtccaagcaatgacatgaacaacattgcgctggaaacaaccagtgaaagacgaatataccatctgtttcttgcggagttaatatcgaactcgcggaacaaatcaagaaatgatcttcgatacggtctgttcttctgattcttatagaaaatcgccatacacaataccattccaaccaaaaggccagccacacgatacaagtactcctgtccggtcacatcatatccctgaagaagaagatatccaagaacaaatgtagaatgattgtacataatcacattgtgacatcccagaatcataagaagcaaaatgcatactacattaataaagaatgccggaaccggtgacaccatattcgaaagcttcggtcctgcaatcaatattccaaagattccgacgatggaggccaatccgtgcgttgtacgaattccaaaatctgcctgtcgaagaacaagcaccgcaagaagcactgtaacgcctactacactgttgttattccctgtgaaatgactgtataaggaaaccactgccacacaaaacgccattacaagatagaccttaaaattataaataagaatgtgtctacgtctttccttcttgtcttctgtcgctttgatcagctgcttagatgcaactgaactaagctgtaactcctgataaaatgtcatatatctcttcctcccactgttatttttcttcaaaatatcaacgagaaactataatacaaatctatctcagagtcaataaaaactttattaaaattttctgataaatcagaattattcaaacaatatatagaatttattttttaggctttacaaaccgttcactctatgataagatagtttgtgtcgagcggaagtggcggaatggcagacgcgctagattcaggttctagtgggagttttatcctgtgggagttcaagtctcctcttccgcattgatggaatgtaagagaaacctttgattttcaaggggttctcttttttattgtctgaaatttgcccatttggggttacctctgttttttcttctccttacataacatctttgcattaatctttacttgcgcaaatggattggaattgataaaagcaacaatctcacatgcgagacgctttccatttatgtgatttttcctcatcgtccaggacttctcctcagaaaacgctctataaaatttatgaatttatcgcaaatttatatatttttttgtgtgtttttcttatatttgtgttataatagattttaatttggtttatctttcacttaattatggaggcataaatttatgacaaaaactcatactgaacaaactggatcgaatcttctggctcaccccggtaggacttccgactcttccccaaaaaatactgtttctaaacagatgtctctatctgattctattttatcgggagcagttgtgtcgtatcgaaaggcaggttatacattcggtcgacacttacatactaatattgagatttatcgaattctttccggagaatgttatatggatattcaatcagaaaacctgcattgtacaaaaggtgactttattatgatccttcctgatgtggtgcattctttttatctgaatgatacttcagattgcgagtttcagcatatacatttcaaccctgatatgttttcaactatcattcttgataatgatggaatattcccgattacgcttcttcatgctgtattattttcttcacatttttattatcgactcatctctgatgaaacgattgataagcatcttcagaaattgattgatttgcgtacttcctctgacagtctgtttacagccgctaatcttaatgttgctcttatgaacctgatgctctatattcttgatcacacagagcttgtacatgaacgtgaacatgcagagcctcaacttcaaaacagttatgtagcttatacattgaattatattcaaactcattacgctacaaaaatcttacaagaagacattgcacaacaattgcatatttccgtccgttatctcagtaaacttttcaagagttatatgggcgtcacattatcaaactatattaatatttatcgtatcaatcgctccattgagctaatgcaggataccaatttaaccttaacggaaattgcactgcaggttggatttaaagactcgcagcactattccaaagtctttggaagcgttattaatgcaacaccttctcaatacaggaaaacgtttttaataaaataactaatcagaaacccagaattttactcctgggtttctctgattagttatttcttttgtaccaattttcttttttacagttctatgctttcttctaaatcataaccgcactgttcattacgccagtttatcgattctttacataaacacataataactactgcgcttagcagaaatgatagaatcataataagacttataactacaatcattttatcttattctctttcttttaatcagtacaacaacaattcctgttgccagacagaggattgcaactcctgctacacctgctacatttgctgcatcacctgtttttactgcatttgattttgatgtcttattgacagtgcttgtagtattcttgttggatgatccgccattagatgaaccattgttggatgttccgctgttgctgtcatccttcttattgtcatcctttttattgtcgtcacccttattgctgtcgtctttcttgtcgtcgcccttattgttgtcgtctttcttgtcttcttttactttcaaagcttcttttgcttcttttacagatttcactgctgcgtcgatctcagcctgtgttgcttctgggttatccagtactgcaatggctttatcaatcgctgcctgaagtgctgcaagggactcttctgtatactgctctgtatctcctacaacctttgttgcatcttctactgcagctttcagttcatccttcttaacaggtgcttccggcttcggtgtctctttctcaacaagagccttctgtgctgcctggactgctttctctgctgcgtctacttcttcctgtgatgcattctcatcagctaatacttcttttgcttcatcgattgctttctgaagcttctcgatagactcttctgtgtatttgtcaactaatgcggcatcgccttctgctgctataattgcaaggttcagagcatctttctttgctttcgctttcagagctgcaagcttagcctctacatttgcctttgctttatctactttatcctgatcagcatttggatcgtcgtaaatagcctgcgctgctttgactgcttcttcaagatctttcaaagatgacggtgtgtattgctctgtctctgcaagttttttgtttgctgtattaattgttgctaacagattttctttcgcaattgtaagctcatcttttgcaaatgttacttcaattgtatgatttgcaacaatatcttcgaaagcatactctgttgcaatagtttctacattttctccgtccactgtaatacttccaatatggtatcccttgtcaggattgatcgtgaatactttggatgttcccttataaactgttgttgtggcttccggtgcaatctttccgccttcacctgctgttgctgtgattgtaaactgtgtctggatatcagcaatctttgctttgatttcggctttctttgcatctacatctgtctgagatgtgttttctgtgaatgcctttccagcgtttaccatcttctgaaggtcttccagagctgttgctgaatatttatctttatcttctgcattaagaattttttctgcctcagcaatcgttgctgtaagttctgtaaggtctgcttcacttgcagttcttatcaattgaatatccagtttatcaagctgtggagctttgtttgtgtccggtgctgtaagaaccaaagttcctgctcctgcagtttttacttcaatgttaagttcgaatgtcttcacagttaagttgttaccttcttttgttgacggacattctacctgcgctgcctcaatcttacttccttcctcagaaaatgcaagtttattcagtgctcctgcacgataagtacctgttactttataaattccaggaacgtttgctgtataagcgtacttagcataatctttgtatgccatacagttcaggaattttccattacttgcccagccctcagaagtaattgtaagcggccagttcggatcagaatctgaatcattgctattaatcaattctgtagcatgttctgcttccagtgtgcttgttactccctttgtttctgggaatacaaatggattttctgctgtataatttgcaaatgcaaatgttgcctcaattttatgtgctttatccacatcactaaatgtgtaagaagttttctttcctacggaatttccatcaacttttacatctgcgatttcatatcctgaattcggagtaattgtaaatgttgcgctttcgccttctgttattttaccatctgtaaggtcttctgttgtgatagttccacctttacctgctgtagctgtgatggcaaatttgtctaatacaacattcttcgggctgataatgaagtagtcgattccaggacctttaccatctagtccatctctcttttctggtggtgtgataacaatcatgccatctccaggttttactacttcgatatcaaatgttacagttccaaaaacaacattatcattttctttctttggatcaactataacttcttggtctttaatctttccttttgcttctgtaatcttgatactatttttcgcattttcggcagaaccactacggtatctcataaccacctgataagtaccagccttgtctgcatgataggcatatttcagaacatcatttgctgccatatctgtgacaaattttccattacttgcatcgcttttagcatcaatcttcattgggtactgagcatcagaggttggatcatcctttaactctgtcgcaaattccgcttccagcttagcacttgtttctgctctccatgggaagttgaaacgatcattctctgtatacttttcacgaaccttaagtgcagcttttgctttatctaattctgtgtatgcgcttctgattgttgcatctgttgcactctcattttccactacttcctgagctgtcttcagtgctttagcaaatgcgtcccatccttctgaataaagatgttcttccaacgccgctgaattcgtaaccaatgtctgaagtttatcttttgtaattccatctgcatctttgattgtgattcttgcagaaccgttaaatccgataattgcattcttcggtgttttttctgtcagctcaattgagaatacacggtcaccagttatagcggtattctgtttggtctttgctgcgacaacactcttttctgtttctccggcttcaaatataacatccggagcatattctgtattaaagtcattctgaatagcacttcccgggtttggctggatcttagctgtaagctttccatttgatccaccgacacgttttactttaactgtcagctcttctttttcgttcatcgtatatgcatctttttcaagctcgatcattcctacgccaccgttgttgattacgtaagccgcttctacaccgattgcagcatctgtctttgctacaagtcttaatgtatgatcagcatctgtcagatcttcagattcgaagatttttgctcctgtggatctgctttctgcatgtgtattaattgtttctactagcttatcatcaatataaacatccgcttgaccatgacctggatctgttgtacccatcagatatgcttttgttccgtggaatttaaaagtaaattctgcattcgctttattggaccatgtattctgtccgttgatgtactggcttcctgtctgaggattccatcctgtggggctaaatgtaaacttacttgtctcattaacacttgttgtatccattccttccggcgctgctcctgccagctggaatccttcacttgctttgtatacaccaacttcactcaacatcggaacttttccattggttgttcctactgtgattttcacctgagttgctgataccggagctgttctaaccagtctctttgccccaacagttactccacttttcagtgtctgccactgtgcatcgtcagacgctttgtactcaactttatagctgttgatgtgctgtcctttctgaattgcttcttcaatagaaaccacatcgaacttcttagctttgtcccacttaatcgtcaggcttccttcttttgttccatcctctgttgtccagtatgtttcatctttatcatctactacatttcctggtttgaatgctatatcatttccacgaacattagatgcctcaattgttgcattctttgccagattctttctgaaagtttcttccacattctgtccaaattctgtcactctgtcgagaattggcttatccactgtaccctgattattcggcggtacattcagaagcatggttgcattatgtcctaccgaatcaaagtacatgttagcaagctgtgtaattgtcttcggagtgttctttttggttctccagaaccatccggatgtaatacgtccgtcacactccggaactgtccatttattaccagtttcatatcctttggaataaggtgtacttccattgctgtcaatagtattatttttataattgacatttgactttgcccaggtatcctcaaaagctacaccgtcttcatttccaatccagcgaacggttgtatatgcctgagctccgaataacatacagtctgctgaattacctgctacttcttttccttcataattttggattgttttaaaccacgtattaaagtcatactcctgtgcattggcaccgcttcctttggctccatccatccatacttcaacaaaacgtcctttgtttccatacttttcatttccgaggatttcttttaactgattgttataatactcattataatcctttacatctttgtctggtgttgttgggtttccgttcgcatctttatatccgtaagatggctcatgaatatcccacggagacagataaagtcccatgtccataccatgttttgtacacgcagtagatatctcctcaagaatatctcctttataccctgctgcctctgcatcatagtctgtatattcactcggccagatacagaaaccatcatgatgcttcgctgttataataagtttcttaaatcctgcactctttaatgtgctcaccatggtttctgcatcaaatttctgattcaacctaaagatttcactcggcttcttatctccgtaatgctctccccactcaatttcattgaacgtattcggaccgaagtggcagaatgctgccagttcatctttctgatatttgtactggttcgcatccggtacaactttatctgattctggttcttttgtactcttatcagtacagtcagaatctgtcactccgctttcagcagctgatacagtaacaactgccggtccaattgaactaaatacagttgtcactccaagaacaaggcccataaacattgatacggtctttttcctcatttcgttcctcctcgttatcattatgggtaggaatcagtaactcctgattcccacctgatctaactaattctttcctcttttaaagtcgaggttataaatttcttaatcctcttttttacgttttactacaccaagtcctgcagctgccgatgctgctaaagcgaacaaccatgttactacatttgttgtatctccagtcttcactgcatttgatgtattgtttccagtacttgtagtacctttgttgcctgatccagtattagtagatcctgcattggatgatccgttgttagatgaaccattgttggatgttccgctgttgccatcatccttcttattgtcatccttcttgtcgtcgcccttattgttgtcgtctttcttgtcttcttttactttcagggcttcttttgcttcttttacagctttcactgctgcgtcgatctcagcctgtgttgcttctggattatccagtactgcattcgctttatcaattgctgactgaagtgctgcaagagactcttctgtatactgctctttatctcctacaacctttgttgcatcttctactgcagctttcagttcatctttcttaacaggtgcttccggcttcggtgtctctttcttaacaagagccttctgtgcttcctggactgctttctctgctgcgtctacttcttccttagtagaatcttccttatcataaactttctgtgcagcttctacagcttcttcaagttcttttacagattctggagtataagcatctttctctgcaagtttttcttttgctgtattaattgttgcaagcaggttttcttttgctactgtaagtccatcttttgcaaatgttacagcaattgtgtggtcttctgttatatctttgaaagtatactcttttacaatatcttttacgtctgtctcatccactgtaatactttcaatatgatatcccttgtcaggagtgattgtgaacactttggatgttcccttataagcttttgtttcgtaacttgtttcgtcttttgctttctctttgatctcgtctttcagttcaatctttccgccttcacctgctgttgctgtgattgtaaactgtgtctggatgtcagcaagttttgcttggatctcatctttcttcgcatctacagcttcctgagtagatgttgctgttaactgctttcctgcttctacaagttccttaagttctacaagagctgcttcagaatatttatctttgtcttctgctgtaagaactttttctgcctcagtaatcgttgttgtaagttctgtaaggtctgcttccttcagtgttgtaaatgtcgctgcttctgatttttcagactcatttcctgcagcatccactgctgttactgttacgttgtactcagtatttgctgtaaggtctgccagatcatactctgttcctgtgataagttcttcatttactttctcatcgttcaggtatacattgtatccggctacttctacgttatctttagatgctgtccaagtgagctttgctcctgtatgagcaatctcagatgctttcacatctgccggaactgttgggacttctttatctgcagcagctttatctacgtaagtaataatcggtgtaatatgagcagatggtttgcttgggtttccgttacattttgctactacacggatgatgtcaccccgagtcacttcgatttcttctgccttttcccagtttccttctttctttttactggtttcaagtgtcaagttcttcttctctgttccatttacatagaggcttaaggtaactgttccgccttcgttcggagactgacgaagatatggctctccatctctaactttgaatgatactgttccgctcttaggtactctgtatgccattgctgttgagatatttgtgcttggcggtgcagaaagtaaaccgtgtttgtctggactgcttgctgtagttacatgctgatcatcatcaataccaggtccataatatgtatgagtagcccagtttggccagccatctttatcaacagatgtcatattcgcccagtcaccggatccgtccttcatctgtccgaaccagacatttccctgctgtccgtttataaaatccttcgtccagttgtattcatttttctgcttgatcgcatagtcattcgtagttccatcttccgctgtgatacgaagtgtcattccgtctgctactgcatccttatctgccagttctttttcagcatttactacagaaacagttgctgtatcagctaccgtaagattcgccttcaattccttcactgttgttggatttttctctgtataaggaacttgtacctctgttcctctcacttcatagtaagaagctttcagttctttatcagaacttgcaacgactgtatacgttacatctgtttttccttcatatgaaagaacaattgttgctcctccctttacaacatctgttccttcaagtactttctcaccgtctttaacagtaactttgacgcctgtatctacgatgatatttttaagaaatgcatctactgtcgtattcttcggaagctcacttacgtttgttccatcaactttatatacgttagatctcaggataagagtgtctgctactacatcactctctgctgctccgatttccggtactgctgtgatcgcatgtccgaagaagtcgtgatcgatcgtataaccatttctgtcaaccactactttacccttattgattgccggagatttttctgcaagtttgtatccgtcgaatactgtttctttagttggatcttcgtgttttctagctgctttgtctgttgctacagaatctggaccggaacctgcattctcaagtacttttgttcctgcgtttacttttacaggagctgcatcgttcggataattctttacattataatataagttattgctataagttttatttccgctaggattccattcctttacattaactggtgtattacctgcgaagtagaaaatattattttccatatctacaggaccgccattgccatggcttctgtgccagatggtattgagaccttctttgatatagaacgtattgttgtaaacctgacaatttccggagttacctgccgggtccaatggtcccatatcttcgttctgactgatattgtaacggaatgtattgttaacagaatttcctccacagaacatgatggtacttgcggtatttccgtggctgtagttgtactgatagtttgttccgtcaccatagtcagcatcccaaggctgtccatcgccattaccacttgcggcattcaatgttttaaaacattcattatactggaaaatcgcatttttacatttccatggccagataccggctgccactcgtcctgctccaacgtcctgtttaccaatctcttttccatttgcatccagtcttggctgttgctgtgcataatctgttgtattaatctgttcagctgcgttctctgacacattgtactgaatcaatggtctgtcaagatacatggttgtgattgcatctccacctacgtggttcagatagttgttctcgatgactacattggaggaaccatattttgccatcgttgcatccggaagttcacctgtttcgaactgtccccactgataggtatatcctactgcaattccccaacggtttaccttattcaaagaacagtttctaatctggacgtcattatatcttgcaattcctgtttcgccttcattcgttggttttgcaacgatgaagtagataccaccgtttgtcatatgcttgttataaacgtttcctgttacatcatggatataaagatcattcaatacgatatgatctactgttccattatcctttgcaactccggcaacaccggttctgtccattgcgtatgcatcattatacgctttaccttgttcagtatctgttgcactctttctgtcgttggtcagttccagaccttcgatttcaaggtattcagtatcttcaattaaaatactggaggatacagtacctttccatttatggttcacattgtccagacgattaccatagttcagctcccactgtccatgaccatttgtattgatctttggtttctctccttctccataagtagatatcttcaccggtgcttctgcagtaccgctgtcctcttttgtgaacttaagagcctgatcctcaaatacagatccctttttcagaagaacggtgtctcccggctcaaggttaaggccattcaccttctcaagtgttttgaatgccttgctttcagaagttccatcattactgtcgtttccaccttttgaatcaacgtaataggttgttcctgtcgcagcagactcctttgcattaaccggaactgtcggcaccattgatgcaactgttgttccagcaagcgcaagagccagcgtacgactcatccattttttcttcatagcttttctccctccattattgtatattcttcaaggttaatcggtttacattctccatgttacctgccacctgagaatctgtttcacgctgcgtgatcatatcatcatacttctgctcacgcagttctctttcgaccgcgatccttgccatctcaaggtctgcattttcatcgctgtctccaaagatccactctcgactttgatagtgttcctgtatttcatcttctgtcagtttcataccttcacgattggtatcgttacagtacttttcttttaacgtgctgatttcataatccagataaagctgaaacgtatattctttaagcccgtagattacttcgcctttttctactttctcacttcgctctgcattttcatctttccagcgtttttccagtgcttcataactactgtctgtgatatctccctgttcttttgcaagatcgtaaacagcatgaatgtgtttcaactcttctactgtattatccgccagaatttcatacccgtgttttccatcatactgttttttccagaagtcatcttcatatatagcgccatactcctgctgaatctgtatctttgtatcatattcaactgccttcatacagttcagatactcttctttactaattacgtgttccgcaacagtaagatcgaattgatttgcctttttatattgaatgattccggcaacagttcctgtaacagcaatcgccaatagaatgattccaagctttaggaattgcttctttcgattcttcataaatcctgcgcccttcctatttgaatttttgttttatcttcacatagattctttttatccacattaactttattatagcaatctggttttttttcggctcgttttttttagttgattttcatgccatttttgtctaattcggaactaaacagaaatttcttttttatttatttccattaaaaaagaccatgaaaaaatgattttttcatagcctttttagcatcaaatttttagttttccaaatcaacaatctgattcttctctaatatataattaccgccatccatatttttacgaacgaacggaacgccttttcttacatagaaagtattatctttgatcagtgcatccgggttctctgccggactgatcgttcctccaaggtcatcaaagctgacattgttacggaacgtattatgaattgcttcctgcaaacagaacatcacacatccgccttcgttctgtctgctgtaattatactcataaattgttccgtcaccggaatctgcatcatatgccataccgtcctgattcagtcttgtgtcagtgccttcattatatcggaacaacgcatccttacacttccaaggccagatagctgctgccacctttcccagtcgattacccggctcgctatagatccgatcattgatctcacaggcgatggaatctgccatattgtgttctatgagtggacgaagtgcatacatcgatgtaatgccgtcaccacctgctgcctttacataattatcgcggatcagcatattttcgtgaccatatttcaggaagatttcctcatcaagctctgctccctggaacttgtcatgtgcataagtataaccgacagcaattccccagcggctcacctgatacacaaagcatccttcaactgtgacatctttataacgggcaacaccggtcagttcttcgttctccggacgaagtgctgtcatatagataccaccgttattcatgtgcttatcatatacattaccattcacatcatggatcagaagattacgcaatgtgattccatgtcgcacccctttatcctttgcaacaacagcaacacctgtacggttcatcttgtctccaagggaatagtactcaccgataattttgtctgcttcgtttgtgatctccagatcttctacgatgatatattctgcatcatacagcagaactgcggaagatacatacccgcgatatacatgggttggtgaatctaatggggctccataattctgataccagattccctgcccacaagcctcaatacgcggcgcggcgccttctccataagctccgatcacgatcggtgcatcttctctcccactgtctgtcacttgaagatactgtccgtaaaagacgctcccacgctcaagtaatacatgatctcccggctgcagacttctctgattgattgcaaaaagacttgcgaatgcactttcgcctgtcagtccatcgttcgaatcatttcctgtcttcgaactcacgtaatacgtcttcgataagcttgtcatatgcatcctcccgtaatcttttttcaataatctgttctacctcttcataagtaaagagatctccgaaatatcgaccgaataaatccatatttttttcgtaaaattctttcttctcctgctctgtgacatccggacacagacctgtgcttcgaaccgcctcacttggctggacaaaatccagtttcagtcttgtcagctcatactgcaaatacgccggtgctgaaaaataacgtggtccatagaacagcttctcctcctgctccatcatcttcagcttttcattatgattctgtcttcttgcttcaagtccctccatagaaggatcctcaagcaatcccattttatgtgctaaaaggaaggcaccttgcgccttccttaaacattcctgttttatacaatacttttgctgcattattttaccgctcctgtaattccgtttgcaaagctcttctgtaagcacaggaagatgattgcagtcggaagtgtacaaatcaatacaccaagcatcagcataccatagtcaacactgtaaccactcttcaggttcgctacaagcatcggcatagtgattgctttgctgtcctgtaaaatgatcgttggccataagtagttattccatgcactcatgaatgttacagtcatagctgctccataagtagatttcataaccgggataaacatcttaaagaagatctgaaattcgtttaatccctcaagtcttgctgcttcgataatatcatgcgggaaagaacgggctgcctgtctgaacagcatgatcataaacggagtggaaattgtcggaagcgcaagtgcgatccatgtattaaccagtccccatgaagtaaacatcttaaacagcggaatcataatggctacgaaaggaagcatcattgcaagaagaagaatactcattaaagtatcttttcctttgtcatgataaatctcgaatccatatccggcgattgaacacacaagcagtgctacaactgtaatgatgatcgcatttcggaatgagttatacattgcaagcccaagattctgcatgcctaccagtgtcttaaagttctctatcaagtgagtacccggatagagtttacctcttacgacatcgatacttgagtttgttgctccgcaaagcatgtaatacagtggaaatgcagacagaaagcttgcaataatcaacactgcataagaaactattgatttcaatttagtcacgtttgtcacctactttcatctgaattgcagacagaattgctaccattataagaatacatacagacaatgctgctgcataattaaatttcggtgtctctacaaaggaaatattgtagatgtagtgtgccaatgtcatagttgacttaccaggtccacctgctgtcaggttcatagactcatcaaacaactgaagtgttcctgaagttgacataattgctgtcataaggattgttggcttcagaagcggaattgtaatctttataaactgtttaaatggtgttgctccatcgatataacttgcttcatatacggaataatcaatattctgtaatcctgcaagatagaataccatattgtatcctgtccatctccagatcaaagctataacaattacccaacgagccggccatgtactctggaaccagtcgacagaggataatccaattcctgtaagaactctgttcacaactccgtccggagcaaacaaggacttgaagatcatagagtaagatacaagtgatgttgcacacggaaggaagatcaatgtacggaaaagacctttacatctgatctttggactattcaaaagctgtgccaggatcaaggcaagaacaagcatgatcggcacctggatcaaaaagtaaaagaacgtattgaacaagcactgttgaaatgttttatcctggaaaactctggtataattcgataacccggtaaacactccccctgtttttctaaaagaaagcaggattgcctgtgccattggataaaaacaaaatacaaaaattaaaatagctgctggaagcaaaaacgcccatccggtaagattatactttttttctaatgtcaattttgttttcttttttcccatttttttctcctaaaacagaaccgggaacgcaatactgcactcccggtacgttctgtttctaatctttgatgattactcaccaacattaaattctactgtatcctgagcgttcttgatctcgctgtcaatgtcagcgccattctgaacaacatttgtgattgcatctgttaatgcacttctaacatctgagtagtatgcgccatagtcgattccaggaaccttaccagcgaagtctacgatgtctttgtatacagcctgtccagcgtagaaatcagatgcctcattgtaaacttcagactcagcagccggcaagtaacttgcgattgctccagcgtttggaagaagatcatcatataactctacgcttccaccgaatgttgtcttaaggaagtcatatgcaaggtctgtgttcttgcagttagaagatactgcccagcttgctccaccacagtttgcgtagtttgtagcaccctcaacatcatcaagtttaggcatgtttacgatagaccattttccagcctgatcgtcagctgcctgaattgaagacatgatccagcatccctggataacaccagctgctgttcccttgttcatagaagcgatgtactgatcccagtcagtgtaatcaaccatgattccttcgtcgatgagctgtttgtatgtctcgattgctttcttaagagctttgttattaactaagtcaacttttccgtctaccatcggagaagcacctgcagactgaagcatctcgatgatgatctcagatccgcctgagcttgtaagcattggaacattgtttgtctcaactacttttttagctttttcgatgaagtctgaccatgttgtgtctttgaagtcatctactgtaagaccagctgcctcaaccatgtctttacggattgccatgattgtagcaccgttatcaaatggtacaccatagttctttccatctactgtagagtcagctaactttcctgctgagaaatttgaaaaatcaattcctgaatctgtcagttctgtaaagattcctgaatagtttgcaacgtttttgtggaaagagtaatcctgcatcaggaagatgtccggcaatgtgctgtaatcatcagcttcagctgctgtgatcagagctgtctcaatatctgaatatactttttcctgaatatccagtttgaaatccgggtgatctttctggtagattgcctctgcctgtttcattgcataaacgttgaagttaggatcccagcaccatacgctcagtgtgttttcctgtgatgcatcattctttgcatcagtgttgttgtcagctttgcttccgcatcctgcaagtacagatactgacattgctgctactaaaagtgcgctcaatactttctttttcatagtttttgtcctccttatacatttaaaagtactgctttataaaatatgaaatgcattccttgcgtttcataagttatctttattcaacatcatctacccaacgcatctcgcctggctctaaatccagttcatatacacagttgccattgatatatacatctgtgtgtcgcgcttctgatgagttattaataactgcgatcttcttactcttcgggaatacagttacttctgtatcaacatttgttacatagtaatgcttcatctctttttccatgcctgctgcatagtaaatagcacgaagaagaattctacagttctgtggagaatatggaagacctgcaaagtatacgctatgtccttttccatattcattaacaaccatctggctgtactctccatccattgcaaggatctggtaattcttgccctgtgcatagacacggcttgttccctcaccaaaatctattttaccttcaatatcctctaaaataaagtggtttgcatctaattcattatacttatctgtattaagtgagaaacacatctcacgatctacgccaagtacatctgacagctggaagaatcttccctgatgctgatatgctgtcggttcaccaactccgatgaatccgcctccctcgtcaacaaagcgacgaatatttgttacaacttcttcatcgatccagttttcagctccactaaatgctgtatatgcatcacctacattgatgattactccaatgtcttccggaatacctttcttcacgtcagcaaaggagatgaattcaacttcgaatggcataccacttaagcactcaagcacaccttctgctgaataagtctctctgtgccagattgcgtgatgtacctgattggacatccactttctcagtcctccccaacagttgaggattgcaaccttaaatggtgctacataggaaggtgttccctgcatattctcatgaatctgacggaactctgtaacaactttctggatctcatcaatgaatcccggccagttactggcaagttttaagtatccgccgtatccgattctgtctaatggtgaacgaagaagagcacgtcttgcttttctccagttgtctcttgcttctccgatcggatctccgccttcgcagaatacatctgggaagaagtatggtaagagacgtccctctgtataatcaacgcctttgatatcagaaatcatacgaagtgtcacaccacttccaacagaacctacaactgcatcaagtccgatgcctgcaaagtatttaccataaggctctgttccgatccagtgatctccaaggaacatcatagcttccttgccataagagtgaacgatatcaaccagctctttcgcgagtgcacaaacttcaatctgctggaattcaataaagtcacggaattctttgctcggtacgcggaacatactgttgtgatatccctgatccacgataaattccggacggaatttatatcctgcccatttttcaaatttttctaagatatatggacttacacttgcactgtatccaaaccactcaacgtacttttctctcttctgatcatcaaaagttaatgtgaactgatggaaaaatgttgtaaatcgaacaacatctatattcggattctcttcacaccatcttttcagcttttcctttacatacttctgtgtcttcggctgtcttacatcatatgtcaactgatgtggtgtatcctgccaatcattcgtaatgaaattgtacatatgtaccggatcccagataaggaatgccagaaagcttactgtatattcatgatatgcctttgtctggatctcaacttctcctgttgcttcatcaaattcccatttatctgtaggaacaatctctccagttgttcgatcgattacttcccaccaacgttttggatcatctaacgtatttactttcagctgctctgtgtgaaatccttccattaagcgaatacgaagtgtttcgcctcttgctgtcacacggttactgattaaatattcctgctgaatttcttccggattggcacttgcccactcattatcttttcttgttgtataataagtagcgtatttcttaaccggctctgacagaagttcttctggcatctctgttccgtcacaatctctcaacgcatctgctcccaagagattctttaatcgtaatgtctcgtcaataacatctgcatctgtcggcagcgtcaatcttcccgtcatcaatatgttcccctccaaataacttttattcttacttatctcatgactaaagtataacgttttcaccaatggatatcaatttcattgttgctcggtttgttatattttttgcttttttattactaaaatactgtttttcttattatttttgtgtataatatgtttaatatatagaattattatattgttttttcgtcttttttacgaattcactttaaaattattgctttttcatatattttatataaaatttaatcaattgagaaggcccatacaaactataacttaactgaagaggatatgcacttatgagtaatgaatttatcaaccttggctccgccacgagcagtcgcgacgattttagtcttcgctatatttctatttctaaatacgaaggtgactggaactctctaccgcacacacatcagttctcagaactcttctatgttttgcgcggtgagggtgtcttctatatagaagatgaaaaagtttctatgaaaacagatgatttaatgatcattaatccttatgtagaacacactgaaaaaacacttccaaacaacccaatggaatacattgtatttggtgttgaaggacttgcgttttctttcgatgatcctgaacaggacgcttcaaaaggatatagtttctatagttatggttctgataaaaatcagtttattaattttgcacaattaatgatgcatgaatttcaagaacaaaaacccggatttgaaaaagtctgtcacggattacttgaggttcttctggtatacatttccagaaagcaaaacctttctgttatttctgaatcctctttccagctttctaaggaatgtgcattagctaaacgatatattgatacaaactattcccaaaatattacattggatttattagctgagatcacacatatcaataaattttatctggcacattcttttacagaatgcattggtcaatctccgatcaactatttagcagatcgaaggatcgaagcatgcaaagaacttttgacaacctctgatctctctgtaacacagattgcctccagtgcaggtttctcttcccaatcttatttctcacagatctttaataagaaggttggaatgtcaccaaggcaataccgtaaattatattcacatataaaaagggagtaatatacttataccaagaaagggctggcacatgccagccctttcttttgaaagaattcttaaaaacttctttccttttacttttcaggaaaatttttatcttcttttacgtctgcgtaaaataactgtaacgctggcacctgctgccagtattgtcgcagttccccacaagatcagtggagttgcatctccggtcttaactgcacctgacttcttatcagaattattcttcttggaatcatctttcttagaatcatctttcttggaatcatctttcttatcattatcagttgcaggtttttcaatcaattccgcatatgccttattgattgcttctgccattgcatcaactttatcctgtttggattctttcagacccttttctactgccgctactgcatcgtccaaagctttcagactttcttctgtatatttacttctgtcaatcttatttgctttttccattgctgcattcaccgctgtatagtctgcgtctttttccggtttcggctcttctgccttttttgtaactgttactttaatagaagctttcacgtcatctgggtttttcatattctcacccattgtcagtgttccttccaatgtgtaagttcccggtgttgtctggtaattatcttttgcccatgttacttctacttctttattcaggtttcctgtcactgtgacagatactttctttggtaattcaagcttcttaaatgcagttccttcttctactgaaattccttctgggtttgttacactaagtacttttacactctttttcatttcaaaagaaaactgctttggaagtgctgactgtcctgctgctgtctttgcaacaatcttaacaacgtatgtgccgtcttccagatccttaagtgtgaactctttttctgtcgtattacctttcagctcaccattgacataaacatcatagcttgcgaaagtggaaccttcttttaattcccatgtgagttttacagaatcatcactgaccggagtctttgtaacagactcgatctcaccttttgttgatccgtcacccattgttgccacattgctgatctcaattgccttctctgatgcaaaatctgcactattcagagcatatactttgaagttataagtcgttccaggtgtcagattctccagtgttacggttgtaccgcttacaatctcgttaatttcattcttttcatcaactactttgtattttgctgctcccggaaccttatcccatttcagtacgactttcttgctttccacaagaactgctgaacctgtctggccttctactgtaggaactttcggttctccaagtgctctgattgctgcatctaatgcttctttcttttcatctacagtttcctttgttgcagctgcatcattcattaccgcaaccgcagcattatatgcgtccataaatgcattccattttgtctcatcatattctgatttaacaagtgctgctcctgcctcaacagatgtctgaagctctgctttatcaactgctacaccttcgcctggtgaaaagatctttaagtagtccaggttaatctgatattttccgtcacgctcagctgccacacatttgattgtgtgctcacgattctcaagatttttctctgagaagataagttgctgattatctccgttacttgatccctctaatgaacaatttttaatcttagcactatcaatataaacatcaaagcttgcaaagttagcatgcttctgagaataaacttctacaccagttccattgaatgtatattcaaaataacttcctacagcgtctgacgtatttttactctctgtctttgttccaccgtgatgcttctcccgttctcctgcccagttcgtccatgttccatgccatgtgattgcgttatttgttgttccatagtctcctgacgccggcacggtaccgtcttctacgattgtctcaacatctgccacatcctgtttgattgcaactgtcagttcaattgtgccagactttgtagcatctgcaacggatgttgctgtgatagtaactgttccgttcttacttaagaatgttaccaatcctttatcatctactgttgcaatgctatcatcagacgtactccatgtaactgtcttatctgttgcattctccggttctacagttgcttttaactgtaatgtgctgttggctttggatactgtagtcattccggatttggagcttactgtcacacctgtcagtgctaccagtgttgaatccagaatttcaaatgcatcaagttcaatctttgtaccagaacttgcagcctgtttctcgttgagaactttcagctgaattgtatgaattcctgctgtaaggtcgtctttgctaaagtattccttctgacgctctgtacttgcactatatgtatcaactacgccctgagacttaccatcgataaatacttcaatcttacctctgtctttattggtacagccgatcaccttgattcctgttcccttaaatgtaagagtaacagtctctccgccctttggactattcagatattgaattgtatccatatagttgacatttttatcctgtgtccagttgccccattcacctacatatgcgattctttcatcagcattgtcaatcttacctgcgccaatcggctctgttacagttactactgcactcttttcagattcaattccatccacaactgcggccacctgatatttcattgctccaagtgtcttgtctgctgttgtatctttataagttgttgttgttaaacctgtctcaatgcagatcacatcaccatcttctacctgacggtatacattatatgttacattgcttccctcttctgctgtcacagcgttccaggaaaggtttacaatttcagcatctgcacgaagtgctgtcagtcctgtcggagctgccacagtagcggatgccggaatgtcttttaatgtataactctttcctgcttctgtttcgaaagagatacggttttcctttacaggtgtcacatcaactacatttccgtcgctgtccatcactgttgcaagagatgcattcgctgtctgcacaactgcttctccgccattcttagaaaggattgtagcagtttttacatttccatctgcccagtccatagatacttcaaagttaccctgtgcaaccaatccatctacacttccgttagcccaagcatccggaactgccggaagaagattgatatatcctgcattgctctgcagaagcatctcagctacacctgatgtatatccgaagttaccatcaatctggaaatatttcggctcatgataatcaaacaggttcgcatagattccattcttgaacaggttctcaataagctgaagagctttatttccatcaccaagtcttgcccagctgttgattctctgtgccattccccatccggtactcacgtccgtacggttctgcatggaaacctttgctgctgcaaaccattctgcattgtcctctgtgatgagatctccaggataaagtccgagcaagtgagacatatgacggtgaccatatccatcacccattgaattaacagttgtctctgtataccactctttaatctgtccgctatcaccaacttcaattggtcctttcagatctgcctggtttgctttccatgtagctaccagctcggcatcttttccaagtacctctgcagctttaatcgtatcttcatataactgccagatcaaagactgctcatatgtatttccatttgtaaccggtccatgctccggtgaaaatgccggtgaagataccaactttccgtctgctccacgaacaagcatctggtcatacagtttagcttcttctttcatcattggatagatattattttctaagtaagaagtatctccagtatattcataataatcccagcaattctgtaagatccacggtactgcagccggtgaccatccccaactaaagtcccatccaggacatgtccatccaaacggattgttctgtgtatgtgccatgaatccattttcttcaccttcggcactggaaactcctgcatagattgccgcggtcacacgccccggttctctcaaagcatcgatataatcgatcagtggttctgcacactctgccatgttggtagaatatgtcggccagtagttcatctgtaagtttacattcatatggtagtctgaatgccatggagaattgttcgctcctacccacagtccctgaagattggaaggaagtgtctctcttacataaccattctcatctgtagttgtctctctggaagactcaattgtcataaatcttccatactggaataacataacttccaactgacgtctttcagcatctgttgcagttcctgctttgtatgcagaaagaagttcgtctgttggctttgttgagactgtctgtccaagattcagatccacacggtcaaagatcttctgataatcacttacatgatttgctttcagttcttcgtatgtcttcgctgccgcctgatctacataccatttcacacgacttgtcagttcatccgcagattcgcctgttctataggacggatattcatccttataatctgttcctatagacgtgatgatggtaacctcacttgctccggaaacacttacttttccattcccatctttcacagtaccggcattgtcagtaataacctgcgtctgggatgtgaatttcatctgattgtctttaagctgtccgttgatggaaatcaatccatttgatacttttgtatcccaatctctcttatagctgctatcaccaatcccattaacagcatcccctctgttattatccggttctacacttacatccagactgatcttctcagaaccgtctgctgtgatatgagtaacaataacattgtccggatagcttgtgaagttctctcttgaataatgagtacttcctttatcataattaacaccggcaattgctgtattcagatccagatcacgagtgtaatttttcacatcgctgttggatgatacattcttaaaatcgatatacatatttccaaaactcagataatatccatatccatttgttccgttatcatcacttgcacctatcaagtttctttttgcaagattagttgcagaattatcctggccattcgcaaagtactcatggattgaattcattgtcgctccattatttcctttattctccagattacctccattgtaattctttctactctcacttggtcctcctgaccaaagtgatttttcattgagctggatacgttctctggtaattccaccaaataccgttccaccgattcctccattacctataggaagggacttttcctgccatccttggtaatacttggtaatatctgccgggctcgtataccatagcttcagatcattattaccggtctgctgcgttacagccgctggttctgcatggacctgcgttgccatatacggcatagatgtcacagctaccgctgctgcacaagcacttgcaagcaccctccatttcattttccttctcataatttccctttctgatacatatttgatgtatcttttttattgtcttaagattcatctgtttttggacagactccacctagtgactgattattctcattgtaaattttttctattcattgtgcttgtttaattcatcctttataggtgccttttttgtcaaattcggaactccagtattccttttcatttatgctatttctttttcattgccttgtaaccaatcagtactgtccactgctcgctacagtcgtcccatataccagacaattcttcccttcacatcatccatatcaacaactccaaacgctctggaatcgtcggacacttctctattatctcccagtacgaagatctggtcatcacctaccgtcaatggatagcttacttgattgttttcctcagtcagtgtctcaccaagcgttccttcctgcttttcttctgctccgttcacatacagcttgccgttctgtatattcacagtatccccggccacagccacgattcgcttcacaaactcttctccatccggtcttttcaagacaatcacatctccggctttataatcactgactctttggttatacacaaccttctcaccactgtgcaatatcggatacatagagtttccctgcactgttgaaattcccatcaaagcatagaataacaccataataagtacgatcaggacaacaaattctaatgttatcactgcacggtatttgcgcatctgtttcttctttcttcttccgatcggagttgaaaaccttatctgttccaacggattcccaagtccgatactctactcattaaaatacggtaattccttgctgcatgtcaatgagtttcactaaaagaaacagcagccggaacattgctgccccggctgccatttcatcctagaatttcttctaatttaagaatttcttctaaacttttgtttttacttcacgatcttttcattcccgcttattcctgtatcaccgaattgtcttttttcgcatctcctgaatacaggtcatccagctgatcttccagatctttctgctgctttttcaagtctcgatttctgacaccgaatacaacgattactgccaacaatataagcaatgcaagaaggtccaaccagcaaaaaccaaatttggtatgttcaaataaatatgccatatgtctccctccttatcttaatcgacagtttctattgtttctcagtggagagagggagccctctctttgcaagctcgcaatcaagctcctctctcacttcatgtaattttttctgtcgtttcttcatgctctttgttgcgaatgcatatacaagtaatgtaatgagcatgatcaggaaatgaaagatacaacacttgtgattgttgttgtcatccagcttctgatctgccaatgatacgttgtcatcatcagaattgaacacttccttaatctctgcaactttctcttctaccttctctacgatcggtgtaacaacgttgtcgataaatgcattgcctgtcggctctgttgtacgagctgccggtccagccggtgttgttgtcggtgttgtaggagccgccggtgttgtcggatctgttggtgtcggagtcggtgcaggtgttatatttgcactctttgtatagtagaatgtaatctcgttagttcctgttgtaatcgtcacattctttgtcaatgcatctgctgtataaccagcaatttctatagctttctctaataccgcacctccaaatatttctttctcctgttacattgtaaccatcgattgctatcgcgtcttctgttacttctgctccaaatgtctggttttctactttcttgctatcgtgaagtttcgttgttgttccctcttcataatagtttactgtgtaagcaagatccgctctctttgtgtagtagaatgtgatctcattctttcctgttgtgatctttacattttttgtttcagcatctactgtatatccgtcaattgcttctgcagccgctaataagagctctgcagacaaattcactgcacatagtacaaattattataaagcatcgaatcaggcgaaagagattctagatcagattgatggaatccttgcgaagtcctatcagatctcccctgattccagctcttatttttctgaaattgaagcaatgcttagtgaatcggatatggatgtgaacttaaattatatatgtctttttgactatctttttatatcttcttaaatgtccgcaaagccttattttatcggctctacgggcattttgcttttgtggtaaacctcacatatctaggtctatcttcttatattttcgctatcaagcgtggttaaaatcgtggtaaatacttctatgcaattagacgctgaacctctgattttgcggtatctatggacgcatgagcgtaccaattcattgtgatactaatgtttgaatgccccatgatatactgtaaatcttttgggttcatgttcttgcttgccagccttgtgcagaacgtatggcgtagcgtatgcggtgtgatatgtggcaagggattgtccttgtggtgcttgttgtatttctttaccatacggacaaataaggcgttgtaatcaatcgcaacttttggcttgtccttatgattgacaaataggaaattgccccgtccgtctatcacaaatggttctgcctttgggcgtttcttcataacccgttgaaatgcctgtatcgtttctctgcttaatggtacttgccttattccgcttttcgtcttaggcgtttcaatataatagccttgttccttgctctttagtaactggtggtcgataatcacaacttcattcttgaaatcaatatcggctactgtcagtccgcacagttccgagatacgaagtcctgtttttaacagtatcagcacatcatcataatacttgtgatacacattgtccgtcttgatgaatgagagtaaggcttgttcctgttcctctgtcaatgcaactttctctttggtatcattttctaggacttcacttaacttgaaatcaaagggatttttccttacgcaatcgtcttgtatggcgatatagaatgacgcttttaacgagcgtttatggttgttaatggtattgtaggaaaagcctttgtctttcatgcgtaacgcccattctttagcgtcagagggttttatcgtatcaatgctcctagcacctaacttatcctctttcaataaccgcatgagttgttcccgttgttttattgtgcttttcttcacatttgccctctgtgcgttctgtttggcatagagttggcaaagcgtcattttcttgcctgtgctgtcgataccgtcctcaatatcccgtcttatctgctgttccagttcacgaagtgagggtttttcccgttttccctttggtgtcgggtctgtgggtgtcaatctccaagcatacacatattttgtgtttccaaatgcgtctacatatttatataagtatttcccgtctgttcgttggctctctccagtatgcaggatacgacctttgttatcccgtcttttttctttcatggtgtctgctcctttccttgttggaaagagccttgatatgacttgtgttcatcataacacatacaaggctcatttgcattagattgcgtccaatttgtcaataacctgttcaaactgtcggcgtttaatctgtatgcggttgccattcataatgagccagccagcgtccttgttttcctctgctaagcgtcttaacttgttttctccgatacggaaatactttgacgcttcttcaatggtaagggtgtatttttcccatacgggaatatcgttgttattcatcagataccccctttcccatgtttcgtgtcatactggatataggggataaggtcggtgcggtttatcctctgtaaatgggcggttaatttactggaaagggaattgctgtatcttgccttatcaagcatagttcccactttttccagtccgcctaatgcgtcatgttcttccaagaagtaaaaacttttgacagcggaaatcacgccaccctctgtgagccattgctgtgtttcttcaagggaattttgctgttttggtacttgcagttttaagacttccacagcccctaaaaagcgttcccaaaaccgacaagttttccatctgctcttattactttcgtttctgtttggtacgacaaagcgtaggttgtttgccaatagaccgaaagccagttctccaagttccagcggtctttccttgaatgtcatggcaaaagcatgagccttatcatcacgcagttgcatttctgtccgtttccaactgccgacttcctcaagcgtcttattatgttttgaacagacttccttatccttatcataaaagcggtaggacaatcccgatttaccagcaccgatataaacagtctttgcggtgtcgaaatcatcaaacttgctttcgtcaaagtggtagccctcactattcgagataaattcctctttttcgcatttcttctttatctgctctatggtaaaaaatggcttttcgtttttatcatcaatggcaatatcaagccttgtgaagtggaagttatcctgtccgtatcttcgctcacaatgtttgaacatatccccaaaagtacaattcctactgtcgagaatacggaaaatatcatcacaccctctgccggtcataacaagataacagcctaacccttgtgggttatcctctgtttttcttgcgtcgcccgatacataaatatctccaatctgccagcgtgcttgataggttttgtatttaatgcttgccggatagacattgaaaatgtcagtcggtaaacctaaaatgtgcatgatgacatcttcagcagttgccgtttcaaatacaatgctgatgtaatcaatcttaacggataaatttttgtgtgtagttatagtgcattactcctttcgtatgtcccgttttttgcggggtaaaaattgtgttttttcctttatttatcacagtttctaggtactatgacatgtatgcgcagggcggtgttacatatacgccctctgcgaacgcctttaggcgttccttttccaaaaggaactgtctgtccgaacacgtctgggggacgtgccccgtccagccagccccttttggaaaccactattttcggtctgatagtccatgcttattcatgctatcaaagtgaaaatgtatcttctctatgcttactcaagcgtgtgattgaccctatcgtgcttaatcactctatctgatacgataataacgccattagaattacttgtcaagaagtttttgttgacttttagatgtagattaagtatgatatgcttataaataccaagaaaagcaacgaaaggagcggttatactaagttatggagcattatgaaaagaaaatcagtttcttaggagaaaacatacagaccataagaaaacacagaggaatgaaacaacaggaacttgcggataaaatcggtatcaatatgcagagcctttccaagattgaacgaggtgtgaattttcctacctttgatacattagaaaagataatggacgtgctgggtgtaatgcccaatgaattattatcgggagaatggaagtatgttaatcaatccgaaaaggaagtctgccagtttttaagaattgaagaacgattaaatgcagaactaaaacatggacattatgacaacttctttgacagcgaggaagaatggctggaatatgagttggaaaagttacgggaatatattaccgactacatcaacgggaaaagtattgtagcgtccgacctttatccaatcaaagaatttatccagcatttgaagtttcaaaaactgttagaccgctatgatgatttatacagcatggatatgttcggggaaagcatagagggacataaatataggacaccttatcaagtcgtaaaaatgataaaccccaattcaaaagaagatatggaattattacgggaagtattgaaaaataaccattttgatgatgaggacgaataacttttttcctctttgtagaagatacagcaaacaaaaagcccagtaaagagtgcaaagcaccaccaatggtggcaaggctcttgacagggctttttcttttctgtggagggtaatcaagaggaagaaaagataaaatttgatttgtggtaaatcggataatatcaatgaaattgtcacggtacaagtttgggctatataaggaatagtaactggaagattgttggataaaagaaaaaggcttgcagttctgtattgatttgcaagcctaaatatattatttatacttctggaaaatcccgactaataaagtatctatcgcttcagctaattcaaatctaactttatctgaggcagaaaaagcgtttcctaattgcaaagttgtataaccgtgaattattccagtaagcatatttaatatttcaagtgttttgtctttgttaagactgcacgattggataagagtagttaataatgaaagatagttgttaaaaatggttgctgtttcctctgttccgtgccacacagcccattgaattgtttcataaactccggggtgttcaatcatatagtttaggtattcgatagaaactaacttaattgcttctttccctatttttccaacggcaattttcatcattctttcattcatgtcacgcataccattatgagcaacttctaaaagaagattatctaaactttctatgtgattatataaagatggtgtacgaatgtttaatttttgagcaacagcttttaacgaaacgttatttaatcctttttcatctgctaagtctgatgttgcttttattactgcttctttagtggttttcatagttatgcacctcattcaaaatatcatacaaacacaattctagctaattgaattagtgtagtcaataacacaattagaaaattatgattatttattgactttcctacaaaaacattttaaaatactaattgaattagttaaataactatttgaagtagtattttgaggagtgattatatgtgtacaagatttgtttacaatggtatagataaaattgttggttttaattttgatattgacctttctgtatgggatcatactgtaattaccgaagaaaatagattttatattggtattaaaatgcctgacggtatgtatcattcatttcatgggataaataaaaatggtaatgtaggaacacttctttatgttcatggtaatgaaaatgcaaggtatatagaaagcgaggattgtattacaatatctgaattaacagaaaaattcattaaggcagagatttcttttgataaagccttggacattgttaaaaagaaaaaaattatttatgcaccagatgctactatgcaagctatgctttctgataaaaaaggacgagttttaattattgaacccggaattgggtatagatatgaacaagaaaatttttcacttattacaaattattctattctaaaaccagatataacaaagccgtacattgtttctggggatacaagatacgaagtggctaaagagttattggcaggatatgataaagatttttcagtaaatgacgcatttaaagtattaaaatctgtttctcaaaaagacttgtgggcaactagggtttcatttgtatattctacagaaaaaaataaagtttattatgtcttgaacaatgattttagtaatgtatttgaatttcagttttaatactaatgaatttataaatttgcaattatgataagaaaggttattatgataggactaaaaaagcaagatataaaagcattgaaagtaactgctgtggaaagttttaggaataatcttatacgattatgcactacctaacagcattttatcaacaactaaatattttacaatattaaaagttcgtacagacggtatattttgtacggacttttttcttgttcttctttttgtattttccaaagatatagacggtatctccgtttatatatttcagcgtatgcggaaaggaggtgagattatgaacccatcttctttcgagcatatcgttagaatacagtttaatgctttgatgatgactgttattaaatgcacagtaaaaaacagaaacagacagtttgcaagacgttctaagcgtgaagttttattctgtgaattatcagatacgaaaaatgttgaatgtgtaactaaggataactattcttgtgattacatttcgtttgaagtcttgaattttacaattcaaatatcaaatgagaaacttgctgttgctttatataagttatcgaataaagagcgtgatgtaattctattacgctattttcaaagtatgagcgaccaagaaatagccgaattatatcatgtatcacgttctgctatttatcgcagaagaagtaacggattgaagaaactaaaaacagtattgaaagaaaggaattgaaccaatgaaaaaagaatatggctaccctacattaaaagtaatatgtcaagcgtctgctggaaatgaaactgccataagagagattttgaagttttatgacgcttatatatgtaaattatgcttgcgtccgttttaccactctgaaagtggtaaaatcattatgcaggttgatgaagaattaaaaggtcaaatccatacagaaatgatgaaagcaatcttgaaatttgaaatcagagtaaaataatcatactacatgaatgaaaaacgggagatacacagatatttgtgctatctcccatgttgtttttgtgtcatatcaaggctcattcaatcgtggtaaattcgtggtaaaatgaatagttttctatacttcaaaatgtttgaaagtatagtgtttatgcggataatcaaaaatcagatataaaatttaaagaaaaacttttctatagaaattaattcagctactcttaattacactactactgttgacgactcacaggctcaggaagtggatttaacactgaatgacccatggacgacttcctccggattctatacgatcacatcctggaaggaagtagcaaccaatgcgtgggatgccgacaactctatgaagctgattcaataagtaggtgcatccgatgtgtttatcgtcgccggtcttccatgctccatgcgaatcaatggaattatcactagaaaaaatggggaaaatcttccccctgccgatacgagtaacattgtatctccaatctaccagttggccggaaatcgtgatgtgaatgacttcgaacaaagcggtgacgacgacttttcttttgctatcccgggattgtcacgtttccgtgtcagtgcatataagcaaaggggtgcgctgtccgttgtgattcgaatcatttccttctctctgccaaatccgactgagattggaatcccgcaacggatcattgacttttctaatttttctaaaggtcttgtccttgtaacgggaactgccggaagcggaaagtctacaacactcgcttgtattattgatgcgatcaatcatcattataggaagcatatcatcacgctggaggatcctctggaattccttcacagacatgacttaagtatcgtcagccaacgtgagatcaacgtcgatacagagagctatgtgactgctctgcgtgtttctcttcgccagagtcccgacgttatcctacttggggagatgcgcgactacgagactatgcaggtcgcaatgacggcggctgagaccggacatttgatcttctcaacattgcatacgattggtgctgccagcacaattgaccgtatcattgacgtattcccgccaaaccagcagcatcagatcgcagtgcagctatctatggttctgcaggccgttatctcacagcagcttgtaccgacgattgatgggaaaatgatccctgtcttcgagattatgactgtgacacctgccatccgaaatatgatcagagataatcaggaccacccgtccaacgcaacatcataaacttaaggaaaaaatagaaaggaatctgttcgcaggttcctttcattgtgttaaaatataggcaagggtgtatatgattaaatcttataaaacaagatttcaaaaattttctgcattattatctaatccggaaattgcaaaatatgcgagacagaatgaaaactatgcttttatttcatgctattattttatcctatttataactcaaatacaatcacaaacctgacggctctgcaaatcactcctgtacatttgttttttgttttctctgcctgatcacttccaacacccaattttcctgttttttccacagatttcattcaatctttcaatttctgtgctataatacgatattgcaaaaatatagaatgcttaaacaggggtgatttacttgaagaagaaaacgcttgtgcctctaatcgtttttttactgggcatgtgccttgttagtttgattgtatacaaaacagacgcctttgaaaaagaacagagacacacaactgcacaattaaacgcagcgacctatggagaacgcataaaaaatgagattgtaaatggaactgagattacggatactctggaacaaatcttgatcagtgatgatggaacgatcaagcactttaacacgatcgctaaaaatcttatgtctgattccattgaaagtgtgcagctcgctccacatggtgttgtgacagatatttatcctgctgaaggaaacgaagcgggtaagattgatctgcttcatgataaagatcgtggtgaaatctcctgttatgcaagagacaatcatacagtcattacgcagggaccctttgaattaaaacaaggtgactatggaattgcggttcgcaatccagtctacttaaatgatgaaaacggacaagaatatttctggggatttacgattgttattttgcgtgttcctgagattttttccgactcgatcagtgcactttcaaattttggttatgaatataagctttcaaaaacagacactccctggagtgacacatatgaagttgtttgtcagtcagatggaaatttaacaaatcctgtttcttatgattttacaataggtgaagagaactggagatttgaggttatgcctgtgagtggatggagaaatgctaaacttatagctgtaatcatcggactttatacttctatcgtatttgttctgtcggttcttatctgggtctggttaacagcaaaagaacataaaaacaaattccagaaactagcacatatggattcacttaccaatatttataatcgttacggatttgatgaattagcagaagaaatgatcgctaaaaatccgaacgctccttatgtagttgcactctttgatatagataattttaagtttattaatgatatctatggacatgtttacggtgacagggctttaaagaatcttgctgacagtatgaagagtttttttccatcggatacattgttgggacgaaacggcggtgacgaattctgtattcttctcccaaattgcacatatgatgatgtgaaagaacagttacaacaattcactatgcttccaaagatattctcatgcaagggaaatgactacccgttttatatttctcttggatatgctgaatatcctatagctgcatcaaaccgtgcacagctcatgcgctgtgctgatgctgcactttatgaagtaaaactgcatggtaaaaatggatgtatggcttacagagaaggactccattcaaggagccgcaaacaacttggatttgcactcaaggatatctctgaacatcttcctggtgcgtttattatctacagagcggacaaggaaaatgatgaactcttttatgcaaaccatgagtttctccacatgaccggatataaagatatagatgagctgtttaagcttacaaagaagagctttcgaaaccttatccgtgaagatgagcaacagcagattgaggcaagtatctggcagcaaattgacagcggcaatgaaaatgactatattcattttcatcttcgaaaagctgatggaacttacctttctgtacttgatcatggaagaatagtagaaaaccagcaatatggaagagtattttatgtgttgtttatggattgggcagacatgcatatccgttacagtgataagttctctgaataaataacagatggtgtgggattatattaaaatcccacaccatctgttatttctttcaagaatgcctttttataaatcttcctgtattttgacgtcgctgttatctgccagacactgttttaacacagtgatcattttttccccatccaatggttttgcaatatgaccgttcattcctgcattttttgccatctgtatatcttccgcaagaagaattcgctttccaatactcttatcagatataacagactgttccgactctttctttttgtatacatcctcttctgatgcaatctccagtggaatttccactgtgaattttgttcctttcccctgttcgctttctacataaatctttccgtccatcagttcaacaaaagatttcacaatagaaagtccaagaccagtaccgaccactttattctctgtcgccgtatgttctcttgaaaattcatcaaaaatatgtggaaggtattcctgcttcatccctattccggtatcttcacagatgaatacataccatgcttttttatcatctgatgctgtttccgtaatatttacatgaatcgcctgaccgtttggagtatatttgattgcattactcactatatttaaatatatttcctgaagttttgtcttatcacagactgcgtatttatgctgtatatttgtatctatcgaatattgaatttccttcgattggatagcagattcaaatactgtattcacagaataaaacatttcgctcaaattctctgcctgcatttttaacacagctgttccactttcaatgcgagccttttccagcacctgatcaataatcgtcatcagaaaattgcccgaggacttgatctttcctaaatactcccttgctttttcctcgttcttaagattctttccgagaagatctgaaaatccaataattgcattcatcggggttcagatgtcatgactcatattaaacagaaatcgtgtttttgcctcacttgcttcttttgcctgttctgccgattttttcaattcagctgcatactgcttctctcgacgttttttgctgcagatctgatcaaaaacagtagcacccatcatggcaattatgagggctgatacaataacagcaatccattgataaattgaaatccatccctcctttggtacgatatccacataccatgtgtaattaggaatctcacactctaccgtaaggctattctcaggcatatgttcctgattttgagccagaacaatccgatcatcggtattctcatcattcgtccatatctcataacaataggatgcttcacttagccgttccatgccaatttcatctataaatttatcccagtcgataactatgatcacaaacccccaaaaggtgtcatttcctgtaatattattctgatgaaccggatggaacagcaaagctcctgttcctccctgttttaattgatatggacctccaagagtatattttcccgtttctttggcacgctttgcgtctccactgcgttcatgctctgtcagcatattcattccaaaagcctgctcatttccctgctctggaaaaatatcagtaataatcccatccggtgcgagttcgaatgcttttacaacacctgcttcattcggaagcatttctgccaattctgagaatgtagtctgattcagatcatatcctgcaagaatcacgttttcaagaaattctgaaagttcaacatactgatctaattgtgcattgatccgctttactgtactttgtgcagtataagcagctgctgtctttttttctttctctatgttctttacaataatacagcccaaaagaagtgctgttataaaaataagcaagccaatgatccaactgtatctttttgtctgtttagaaccggtacttcccttgtccatttactgttgcctattcatcttcaatgttttctgttatttttaattatatcatgtcatgttttttcatgtcttttttttctacagtaaacggataacaagttctttcattgtctgctgctttccttcgcattatccttaacctatttcttttttcttatatcaaatagatcttttcagcattaccagcattgtaataaagcacaaacttccaccaatcacattagatatagtctctgctaagaacacccctttcgttcccatgtgaaatgcatacggaaacaaatatgtaagcggcacaacgataaatacttttctaagtagcgagaagaaaatcgcctgcttcttcttgttcaatgatttgaaaaccgtctgcccaacatactgcagatccataaatataaatgctgcgaaataaagtttcagtgcttctacgcaatcggcaagtaattcactgtctgtgctgaaaattccgatcagaaattccggttcgaaaataatcacgctccacgcaattgctgtatagatcaatatcatacaagtcaatacgcagatagctttcttgactttcttcggacgctgagctccataattatagctcaagatcggagaagttccttcattgatagcatagatcggagtttccaccatctgacgaacacttgatacgatcgtcataacagagatatatacatcaccgccacttccaaataaattgctaaatgcagtgatgatcacaatgatcggaaagcataaccccactgccccaagcgcggttgttcctactgatggaatcctggcaatataaatccgatccacaatgttgtacaaaagactcagtatctgagccacaagcatcggtaacgctgctcccaaaatatttcctgtaactgttccgtggtcaaaatcaatctgtttcatctttataatatgatcttaaaccaatctttctcttcaaattcaacaaccgtacaatcatttgcataagtacattccggaagtacgatcattgcatgaagtacctcattattcgccggaagtggacacagatgccagatcgctgcattgatctttaccatgcatccctttggtacaaggaaagccttcgcaagttccggaaccggtgtgccgccggaagcaggtgcaacatggataagcatgtcgtcatcaagagcaacaatcccttcccatgtagttgtatgatattccgccatcttaacaattctttcgtcctttcgaacttcaatcggtgaaaatgccattgttccaacgcaggttcctgagatgcggtccggatagaatttatgaatctctccctccagtggatatccctctggttctgtcatactgcaaaatgttccgtacggtgcaaaatctgctgcattaatctttactgcttttacttctctcatcgagtaagtcctcctttgttttaatataatcgtatcgctgatggaaagcagactagcttgctccactctcactaccaactcattatgtctagtatatcataatcaggaccaatagcgggtggttttttgtttctatggattctggtctattgactctatacaaggaaaaccgaatcaccgcggaaacagctctggagtatgctgcaaatccggaaatgttgaaacgtaaaatgtaacgtcttctttccggattcgcaaacatttaatatccagtaatttatgcaattaaatctgcgaatcctgtggatacaaggaacaggacaagcattacgaccggaacaacataacggatcataaagcggtacatacctgcacgtttgaatttctctccgttgcgttctacttctcctatgatccaatccggtccgattacccagccgatcaggatacttgtcagaagtgaaataaacggcatcagaaagctgttgctgatatagtccataacatcgagcagctgtcctacggatccgttcggaagcttcaattcgaagtagagtttgttatatccaagacagatcaaaaccgctgtaataaaggagtaaataccaactactccacacattttcttacgtggtttgtgatacaattccataccgtttgcaaccagtgtctccatgacagatacgcaggatgtcagtgctgcgaatcccatcattaggaagaatgcaatcgctgcagggcgtccgaatactcccatagcatcaaataccttcggcagtgagatgaagatcaaactcgggccggaagccattccgtcatttccaaggaaaacaaatactgctgggatgatcatcattccggcaagaattgccacacctgtgtcaaaaatctcaatctgatttgtcgctttattcaaatcaatgtcatttttcacataagaaccatatgtgatcataattcccatggatacactcagagagaagaacagctggctcatcgcatccaggagaatctcgaggaaacgcttcactgtcaatccgtggaaatccggtttcagataaacagccagtccctgcatacctgtacgaacagttccgtctggtgctgtatttgtcaatgtcagacagaagactgcaatgatcacgatcagaaggatcaatcccggcataataatcttggagaatttctcaattcccttctctacaccgcgaaacacgatccatgctgtcagcgcaaggaagatcagcataaatacgatcggtgcaatatctgatgtaataaaggatgtgaaatatccatctgccgcagcttctattccatcagaaacgaggtatacaaacagatattttgtgatccaaccgccgataacggaataatatgtcatgatcagtactggaacgaggaatgtcaaacgtcccagaaacttccacttcgggttaagctcctcaaaggctttcaatgcatttttcttagtctttcttccaatcgcaacatctgttgtcagcaatacgaatccaaaagtcaatacaagtacaagataaactaagagaaacaatccgcctccgtctttcgcacagaggtacgggaatctccagatattaccaacacctacagcacttccggctgccgctaagacaaagcctatcgacccggaaaagctacttcttttttctttcatgtcaaaatccccacattcataaagttatttaaagggcctgaatatcaagcccaatagctatattctatataaatttcagataaatgcaaaccgaagaagtttctttatgcgaaattttttatcaaaaaagtttcttgtgactttacaaatgccctgtttctcagatataatcatataagaacagcatttatcatgaaaatggatagtatgaggaaacaatatgagtaattatacatgttatgtcggaaaacaaattcgaaaataccgaaaagcagggaaaatgacactgcaggatctcgcagatgccatccataagagccgcgccacaatatgtaaatatgaaaatggagagattgctgttgatattgagactttatatgagattagccaggttcttcaggtctcaatttctcagctgactacttatcttccggaaacaaccagtgagcttatcagtacgcccggaagaagtcggaaaagtcctttctttcaggcgcaacgattatatttctacttctatgacggacgatatcaacgcacgaaagatggcgtcattgatatttatgagaagaaaggtgaacccggaaagtacgaagcgactctgacgatttgctctgtctccgctaacggaagcagcagcgagattttctacaccggacgagttctttatagtgatatgctaatccgcttttctttcgtaaatcaatataacccactggaagaagaccttctgtacatcttcaaccctctggaacttcgagatttcacaatgggactcttgtgcggtatctccagtgcagaccttatgccttgtgcatttaaatgcgtagtcaccttaaaaccacaggaacacacagagaacttccgccatcagttgctttttacaaagaaggatcttaaacggttagaacaacttaatatgctgttggtggagaataaagagaattaacatacagtgaaagggttcggcatcttgccgaacccttcgttttcatctgacatatcaccgcaaaactactgcggataaaatcataaatcctacaattgataccatcgtgtataccgaaatcgccgatgagtagaattcttttttctcttttccattccattctgatgtatcacacttgatatttttctatcacacacgtatgcttccgttcgcccaccggagcatctttatcataattaattccaaccagcaaaatctcaccgccaaaatctttgattgccgccgggtagttccgtttcttaatctgtgtaattgctccttccgctgatttatcccacttcatttcaactactaatgccggaagattcgacgttttctttggaaaatatacaatatctgcatagccattgcctgacggaagttcttcgaacttcagataataatcgcgataactaaaatatgcaagcttgatcacgcttcgtaatgcctgctcattattgtagaaaagagccgttgtctcctctatatggatcttctcaatctgtgttgctactgcatccgcattcatatgtactgtatctgaaattatctggtcgctttcacgcacacgttgaattgtctcgttccgtctgactcccctgatcgtccttgaaaattcccgcttgatttcttcatttggaatatgcactttttccgtttctttgtcataagccagatagcccagatgaatcaacaatgtcagtacatcatctttctctctgaatgttacaagatcattcgaaaatccactcgtatcaacttctacttcaataccaccgatcagttcagcgattgtcttggaaagtccgtcataatcaagactaatatattccatcaaactctctgctgccgatgtctgcgtccagtaggaatcgaaatcatcatttctaagtgctttcattacagagttcggattataaattgaatttgcatttgggaatgaatatccatcataccatagcttcatcttcgaaaaatctatttgatattcgctgcacaggttctttacttcctgttctgtaaaacctacatatggcgcaaactttcttggttttaccattgtaaattcttcgaagtcagaaattgcagactgtgaaccatcttttttaatcggcaggattcctgtcatataaactgctgcgaaaatcttatccgttgttccactatttttaaataatgaccgtaaaaataatagatactctctctggattcctgcatttccaccattctcacgaatcggtgcatcccactcatcgataatcataatgattttatttcctgtataagtcaccagattcgctaatgtatcaaacagtgcttctgcttctttcacttccgaataaatatctaaaacttcttctgttatatttcgtttcacataggagactgcatcttccgatgatgtcacaccaagaacactcgccatatccagatagatcacatcatactgattcaaatattttaaatattcatcatcttttgcaattttaagatcatcaaacaattccttggaatcacaagtcttatcataatatgcacacaacattttggcagcaaaagatttcccaaagcgccgtggtctgctaatacatgtcagattccgtggcgtattgattgtttgattaatcagacttatcatttctgttttatcgacataaacgtcatttctcatattcgaaaaaccgctgtttcccggattcaaataacttcccatctgtgctgtcacctcctcgcatatttttatttaatttcttgtaacttacttgttatcttatatgttttcttactatattatatctaatttttatttgttttaccataacttacgtgttatcttgtacgttttcttgtcttttattaatttgcgaacatatcaagacttctctctgcaagttcctcaaattatcattacaatcatcattttctcttgacaatcctttgaatttccatataattatctatggtaattaactttggtaactatataggagttttattatgacaaataaaaaaatcaaacgcatgctcgatgcatgttatcaggcaaaacgaattcgtgagatgctccctccgcttccggaaggtatcatgtcatctcacatccgctatatggatatgatccaggagcttcagaaacagaaagtccatgtaagagtttctgatttaagtgacgttctgaatatcccgcgaccgggtgtcacaaggacaataaaagagatggagaagaaaggattagttcaaaagatctcctctccggatgacggacgtgtcacatacttgtctttgacagagcacgggaagaaaatctcagaaaagtataatgaaaattattttaatgagctgattccttaccttgacggaatctctgatgcggacgctgactgcatgattcagacgattcagaaattttacgacatcatgtgtgaaaggagtgctcaaaaatgactgataaaactgctgattttacacaaggaagcattttaaagaaactggtggcatttatgatgccggtacttggtgcattgatccttcaggcagcgtatggagcggttgaccttctggtcgttggaagatttggttctacttccgggctttctgctgtttctactggaagccaggttctgaatctggtcactttcgtagttgtccagtttgctatgggtatcacggttctgattgcacgttatctcggcgaaaagaaaccggaacagattggctcggtcatcggcggtgctgcaattgtatttacagcgatttcagttggattgttcatcgtcatggtttgtttcgcgcatccaatcgcgatcctgatgcaggctcctgcagaagctatagaattgactgctgtttacatccgtatctgcggaagtggaatcttttttatcgtcgcttacaacctgctttctgcgattttccgtggacttggagacagcaagtcccctctgctttttgtacttgtcgcatgcatcataaatgttttcggtgacttgatacttgttgcaggtttccacatgaacgcagccggtgccgcgattgcaactgttttcgcccaggcaatcagtgttgtcttcgcattagttctccttatcaaaaaagaactaccattcaagattagaaagaaagacttctgtctgaatccacagtgcaagaaattcctcattattggactccctcttgcactccaggaattcctgacacagatgtcattcctcgcactctgcgcttttgtaaatcggctcggactggaggcttcttctggttacggcgttgcctgcaaaatcgtaaactttgcaatgctggtacctagcgcactcatgcagtccatggcttctttcgtctctcagaatgtcggtgccggaaaagcaaagcgtgcaaagaaatctatgttcaccggaatcggtgtcggtctggttgtgggatgtttcgtcttcactcttgtatttcttaagggagatgtgctggccggattcttctctaccgatgcagctgttattcagaatggttttgcttacctgagaggattcgcaccggaaacaattgtaacagccgttcttttcagtatggtagggtattttaatggaaatgataggactctttgggttatgacacaaggtctgattcagacacttctggttcgtttgccaatggcatacatcatgagtatccagccaaacgccagcctgacaaagatcggtcttgctgcaccggtttctacagcagttggaattatgttgaacgttggattttatgtttatttaaatcgaaaaaaatagccccctgcaaccgctgccaccggcattacaaccccgcaggcgattgctccgaagatcattgaggcacaattttcaaacatgattttagaattcaacagtagttcaaacgaatatccctgcatccgcagataggaaaaaagcagaagtgattctcctaaatatgcaaacagaagtgtattcaccgttgttccggtcacttcttttcctatctgcattccgctgtgaatcagttctttaaaagtcatatcttctttatggcttttcacttcataaacagatgtggtaactgtcagtgccatatcaagaacagctccaagagtactgagaagtataacagagacagcaacatttctcatactgatattcaggtttatattataataaaatacatcttctccaacctgttgtatctcgttaagacctcccgcctcacttctccatacaacgatatatatgaagaagaacagcaacagcattgtgatcatagttgcaagaaatgcactccatgtctttctattgctaccattttgatagaacaacgtaatacaggaaatgacaacaccgacacaaaccgtaacgagaagaacaggaactcctgatgccataagccagattgcaagacttaagatcaacagatttccacacaaagcaataagcgaaacgacacctctgtctccaccgacgaccataattaaaatcagtaaaatcaatccaagtgttatcagcattttccttctccctgcacctttcttgctttcttctgtctatgaaacattcctgagacctttatcatcacagaagtaaccaaaatagaaatcggtattgccagaacaattcctatactttccaccagaaatctgcacaattcacatggaatgtgtagctttataatagtaattaaactcacatcattattcattcggatcagacacattggaatcagtccacagccaaagacaaacaacagcacatttatcatcgttcccataatgtcatatccaatttctcttcctgatttaaataattccaaaaatgtcacttccggcttcttttcaacaatttcacttaaggatgcagcgatggcgaccgccacatccatgattgctcccagtcctgagatcaggatttctgcatggaaaatttcatccggattttcaatacttccaagatactccatggtcgaataatcaagatcttctgcatgatggattacaacatcaaagattcccatgatcattacaagaacaatcaatgttgtaaaaagtgctgcccatgtctttttatgaatcccgtttaatccaaccaatgtaataaccgcaaaaagaatcaccagcctgctgcacatttccagcacatttgatgtatctcccgctttccaaaaaccaattgaaaaaacagtaacattaaaaataacggtcaatatcgtaagcgcaccctgtcttcctgcaacgataattaatataaacatcagaaatcctatgagtatcataagctctgtatctcgtttcagtccacgaattccagaacccattctcttgcttgttccattgagcagtaccttatctcccttatgatatggctgtttcatcattccggtatacgtgcactcattcgtaaaacttattgtctttcccttgttttctccatttaggattactccctggatattctgcttatattttttctccttcgtccctctggttcctgtctcttctcctgagacactggtttcgacctttgtcagttttgcaatgggtgtgctatacaaccatgcatcatttgcaacaaagataatacacagcagatacaatatgccaaggatacaatataactttcttttcttgctttgttttacaaattccaacattactttacttccatctcgaatctatcaaaaatcatttttttattttaacgcaaaaaattttattgtcaaggtgaatttgaaaatgattttcatgttaaaagaacaggacagcacgctaacgcgcacagctctgttcttctgttcttcttttctctattctactttgcttctccctccgggaaaataatcttattcacgaagaagaataccaccatcgacactcctccgttcagcacggttgttccgatattgtaaagccatcccggtacaaacattccggcaactgcaacccagatacaattgattgagtttacaatacatgtaacaatacagaatgcgatcagataccagaacgcctgataccagatctttcctttgctgcggaacacaaagcttctctggattgggaaattgatacactcaccaacgagcattgcgatcatgtatgcacagaaatacggaagaccgccatgtgccgcatcatatccgataatattccacttaaatgtctcaccgaataatgtaatgtcgattcccgggaaaccgaaatcaatattcggaagtcctgcgaatgccagtggcaaaaacagcaacattacatatttaagtacagtgatcagattacttacgattacgaacaatccgccttctcttatccattttgaagcactcggatgtttctttgcaaaacgattccatatgttgtttagcttattcattctacattctccattcttctaagattctagattctcttgtcctcccttggacttcgtatctatatcctaacatggattacatgcctatctattatacttacataacctgcactttttctgcataaactgcaaatgttctttcttatcggaacccaaaaatgtgtgcgatcttaatctccttgttcttctttaatcggaatcaaaattttcaagtcaaaccagttctcttttgtatcgatcgtgactgccccgccgtatttattcactgtataacgaatactcttcattccgtatccatgatactttttgtctttctttgtcgtcgcaatatttccatcctggtactgcagtttttcttcacagtaattctcgaacttaagaatcaaaaatgccttctgtctggacactgtaacatggatcagtctcttttccttatcctgtattttcatctcacattcgatcgcattatcgagtgcatttccaaatatactgcagatatccataacgtccataaaatctaacagtgttccatctgccacacaggtaaatgtgattccattcttattacaatacagacttttgctcgtcagcacagtatcaagtaccttatttccggttttattctgtgcttcatactgacggatctccgcctccatctcatccaaaaatgcttctcttttctgaggatcttcctcacttctcaacaccgcaatctgatgtttcagatcatgatatttgtaattaatcagttcaatactttcttttgactgcacatactgtgcatactgattctgaagtacattctgaactgcctcgagctcttttcttgcccgcatctcacagcattgcatgagatgtgcgtacagaatcgcaattccggccaaatccacgatcgtacgaatatttgctatctcaaatgaataccttccggaaaatggagtattgattgtaagatagctaatattactgacagcgaaaacagatattgcaatcaaaaatgctgacagacattctttccaacctatctctatctggccatcttccgggaaatgtacatacaagatcttgaacaagatcacgctgattattccatatccgaggataagggctaaccattctctccaccatactcctgattgcgctatcctaaagtaacaagcaacctgccattcaatcgacgccatgaattctgccacaacaaatgcaatcaacacgaaatatactgcgtctgttatttcgattgcgcaggatacataaatgaaaaacagcataaggaatactgctacgatcatgcagggaatccagaaaaacaatctgacatcttccgtcacaaccatgaatccgctctgtacaacaagcatcactgccatgatcacacctgtctttatttttgaaaatctctttttaaatggcaggataaatatcatgcatgcaagccactctgcaattgccgagtaaagtctcgggatatccggcatcaaatgatcgatcattttatcacctctccccaatatcttgtcaaagcttccataaattcctttttacgtgcacgactcaacaccagttcttcaccttttaccaccgcacagttgtcctgaattcggtctacgtgctgcagattaatcagatatcctttatttcctctgcagaagttcatcccagaaagcttttcatccatctctttcattttccctgtggtttcataatccccaaggatcgtatgaaggatcaacgtatgtccctgactttcaatatagtaaatatttgcgatattaatacgcaccataccgccttttatatttaccataatcacctttgcttctcgctttttcatacgttcgatcgcgcgattcaatctctgggagaacgcaaaataagaaactggtttcaacacataatccaacgcgtctaccgcataacctctaattgcatactgtgccatgtttgtaataaagatgattacaacttcactgtccattttacggatttcttccgcagcggacattccatccatgaatttcatctcgacatccataaggataatgtcgaactgagatttgtatttattgacaatctgatctccatcggaataaatggttatctcgaacgcttcttgattctctgcctcgtattgatgcagaaattcttccagctgttttgcatacattgcttcatcttctacaatcgcaattttgatcatttgaatcctcctcctactatctttctatatataataaaggatttttttatctatctcaagtcattgctacgctttatataactgttcagaggcgattatgttatcataacgaaaacaggattggcctgttttttgctgtccaatcctgtctttcatagtttcatatattacgcttctgcgttatctacattttttcttttctttctgaaacgtacgatcacgatcgcatctgctgcaattaagagaactgccagaattacgtctactgttacgaaaagttttgtcatattgctcatacctgcagccgggttaccatctgcatagtatccgctgtttgctacagtgtagagaatgttcttacatgcctgtctcattgccagtactgctgttgcactctcatctgtaagcttgttagactcagcactgttgaatccaagcatcaggtcattcccgtttctgatacagtgatctgtgatcatatatccataagaaccgtcgtaatctgtctctaccattccaacgaatccccattctccacggagaacgttattcagaagtccgttgtttgcacagcttggaactgtaccaatccagttaaaggatgacattgctgctattgcatttccttcaaatcctttcactgcaagttcgaatgctttcaggtatccttcacggattgtctgctcagaagcaaatgtcagaaggaaggaacaacgatttgtttcctgatcatttaatgcaaaatgtttgatataaggatatacacctttcactgcagctccattcatctcattcgctgccatgtatccggataatacgccgtcttctgaatagtactcgaagttacgtcctgcaaatgcagatctgtggatattcattgccggtccataccatccgaagttatctgcgtcaacatattcctgtcccatagaatctccgacttcttttgccagatctttattccatgtctgagcgatcagtacttctgacggataagctgttccgtatgtctttgtaataaagttattcagtcctgccggtccgtcacaatcagatgttgcactctttcctacagactggatttctgctgtctgccatccacctacattgataagtgttgacatatcctcgaagcttaactgatctaacagtttatcccaatcttcgtcatcatatgattttcctgtaaggtctgcaagctgaagtccgttatcctgctccatcttcggcatctcgtcggaatcatcattgtattttgtaccgtcatagattccaaatacgttttcttctactgcttttcttgtctcgtcgctcattacataagcatcttcacttaactttccacaagcagattcataatttgcaaatccgtttgctcttgaaagctgttcgaaatcaccgcgtgagtaatcttcaaactggtttgttgctacagtttcgtcggaagaacgtccgtctttactgtagtcaatatcactgtctactgtaaatttctcttctgccaaaacagtatgtgaatcggaacgaagagagattgtgtattctccggcctctaagatatatccaccaccggaaatcttgattccttcagaatcataggatgccatatcctctttgttaatagtgattgattttgtctctgctgctcccggatcaagagtttctgttttctcaaatgcgatcaggtttgcagatgctttttcaatcccaccgtttgtgtatggtgctgtgtaataaagttcgataacatctttacctgcaacatcacctgtgtttttcactgtcacatcaaatgttactgtgtcaccattgtctttaaaattctcaattgtcttttcaaatgttgtatagctcagaccatatccaaatggatactgtactgtatcttcgtactggatcagcccttcttctgcggctgtttcatagaatttataacctacatagattccttctgcatagtttacaaatcccatacttccttcgtaagctgcatcattttttgcgatctggtttttcagatcatctacatttgtgtatgcgttcagacccatattgttgtaataaggtgtctgctgaagatcttttacaaatgtatcgactgtctttcctgatggattcacagatccgttgataatctctccaagtgcctcgaatcctgttgctcctgctcccggtgcatagataacagcaccgatctgctcatacttatcaacccagtcaagttccatcgcattgtttgcatttacaaccacaataacattttcaaactgagagcagactgtatctaacatatcttcttctgtgttagacagttcaagatagctttcgccctcgtcgaaatcatcataatcaccgttgtttgtgtaacttccttttacatatccgtaattttccggtgtgactgacaccgtttctgccagtttcttgtagcttccgtcgatcactgatttcatatctgtcggaaggtctgcaccttctccaccggaacgtccgatcactacaacagctgtatcagagaattcttttgcttctttcataaggctgtctgtataatattcttttgttggctccggtaatgtccagtcctgctcagccatagcgattgtcggacggtcttctcggtaatctgtgtacatctttgtcagagattcatttgtctcatatcctgcatcttttaaagactgtaaaatactgatcgctgtggaagaatctgaagatccggatcctgttccaccgtataacggatttgttgaatcccatccgaacacattcagtttcttcgtgtcagaagcgagtggtaagattcctttgtttttcagaagaaccattccttcttctccgactttctgaattgtttcactgctctgctctgttgtttcttttgaaagctctactttcttcgcatttaaaatacttgatacgttgttgtacatcggaccataacagatcacattaacaagtactgcaacgatagccacaaatgcaattcctgcctgccagcggatcacgtggcgaactccctttttcgctttatgcgctgcgatcattactacgatcattgcaactaatgcaacaaggatagcaataatataaccactcagtcgttcaatatatgacgtcaggtctgcaacacttactcccagactagtgaatatcggggacaataagtttactaaaaagtttgtcataatgtttcctcccttttgttgatgggcttatgttaacataatttattctctcatgccttttttcgcataaatggtacgtttttttcataacctgcaattccatttggcatatttaacaatttatatatttcgtttttgtctatattgcctatcctctgttgattgcagctttgatcagatgtgctgttcctttaattcgatgtccgttcgccatctctgtcaatgcctctgccattttcatcgtcacaataccgcctgtcattttcgcatatccacgaattggcatattgtagttgaataaaacgttcaggttcggctttccctgccagtcgctgattttcagaagtaatttcaggattgcacagagcagttttccaagaattccttttccgtaatacaactgacaaactgcatcgttcattcggatctcaccgctccagcttccatccggaatctctcttccatacagaatacggaatttttcgtctgaaatgtctttaatcttgccgctgaaatattccggcagttcttctttcttgtagccgccgttttcaacagtaccttttacgtctaaagcaccttccagaaccatctgctgcgcattttcaccgatcatgatctgataagtaccgctttcaatctcccagctatctgttcttgtatcataaaaacggaatgtcttatcatcaaatccgattcttacttccttttcttctcctggctgaagctctactcttacgaaacctttcagctcgcgaaccggtcgaaagacagtctcagaagattttccaacatacagctgtgcgatctcagttcctgacatattgcctgtattcttaattgtaaatgtcacaccttctgtatctattttcaaatctttatattcaaaggttgtatagctcaatccgtaaccaaatgggaaacgcgttgattttccaacagttgtgtaataacggtatccgacataaagagactctctgtactcactgcttctttctttacttggataatatgcatacgccggcgtatcctcataatagattgggtaagtctcatttaacttaccggatggattcacctttcctgtcaaaatgttcaacattgctgacgcgcctgcctgtccgccaagataaccatgcacgatccctttcacatatgggtaccatggcatctcaatcgctgatccggctgaaagaactacgattatatttttatttactgttgtaagttcattaagtaatgtctcctgtgctgccggcatggacatatgtgtacggtcaagcccttcggactcactgatttcatcaagtcctccaaagaaaagaacgatatcggccttctttgcaagctctactgcggcctttgtcagcttctgattcggttttctattgcgaatatatccctgctcatatgcaataacatccagatctgtggatccgatcacatcaaggattgcttccggctgttttgccgggtttacaagtgatgatcctgcgccctgatatcttggggtctttgcgaaatcaccgatcaccgcaacttttgttccaggtttcaacggaaggatctgttcttcatttttaagaagaacaatgctttcctctgccgcttttcttgccaggttatgatgcgcttccacatcaaatgtttttccctttgcgtcttctgttgcctgatgtgttgagaaaatcacatttaaaagttcatccagtctctgatccaatactgcttcatcaagatcaccgttctcaactgcatgaataatatcatacatacctgattttcctgttcccggcatctcaagatggcttccattcttcacgccaagtgcatggtcgttacttccgccccagtcagatacaacaaaaccatcaaagccccactcatctaccagaatttcctgcagcatatggttgttttcgtttgcatagattccatttacttcattataggaagacatgatggattttgatttaccttccttgatcgcaatctcgaatcctgttgtataaatctcacggaacgttctttcgtctacgacagaatcgttcgccatacggcgcagctcctgactgtttgctgcgaaatgctttggacaagctgcaattcctttgctctggattccacggacatatgccgctgccatctttcctgcatgatacggatcctctgaaaaatactcaaagtttcttccacacaacggacttcttttgatattcagtccaggtccgaggattacattgacgcccattgtcactgcctcttctgcaagtgcttctccaatttcttctccaagcgcttcgtcccagctgtttgccactcctgctgctgtcggaaaacaagttgccggaagactggcattcaatcccaaatggtctcctgctcctgcctgtcttctcagcccgtgaggtccatcggacattgccatagacggaatcccatatttttcaaaatcaactgtctcccatgtgttctttcctgacatcataactgctttctctgccagtgtcatttttctgatcaacttttcatatttcagactcattttgaaacctaccttttactctataatatgataactattatttggttactgtcacagtacccgtgatttttttgcattttgtatatcacaagtatctttttaatgaaattatcataacacaaaaagcagaccgttaaggtctgctttcataaatggtcgttttttctacatgaactgttctgattagattgcaagcaggttcttgattgcttccatataaacatgaactgcttcttcaacctctgacacgagtgtgtactcgtctgcaccgtgaatgcggtaatctacgcccggtttctccggtccgaatgcgatgatgttctttaaggacttcgcataagttccaccaccgattactaacggtttgttctctgtatctcctgttacatctgtataagctttgtacagtgcctctacaagtggagactctttcgggaagaacaatggttttgtagttgtgtggatctcaatgcgtccgttctcgtcttcaagctttccttcgcacatcttaaccatatcttctacagagtatgttaccgggaatctgatatcgatcgtagcggagatcacaccgtcttctgtcttaacgattccgttacagaatgtaagctctccaaactcatctgcacatttcagaccgattcctgatccgtcacacgctgtaccaatgtgtgagttatagaattctacgaaatcatcttcaaatccggcttttgcaagacaatcaaagataacacctgcagcgttaactccaaatgccggtgtacttgcatgtgcagatactccctttgcataaatactgatctttccgtcttcttctgttactttgtatttctgaagctttgtctctgcgaaagcagcttccagtctgtctttcagtccttcttctgccggaatctctgctgtacatgcatcacatacggcattgaatacaaatccaccattgatagaaataatctttgtattcttagaagttgccagcatgccaagcatacctttctctccgtgaatacatgggtaacttgcatccggtgtaaatccacaggataactcttctgccacttcattataatgctccatacatctggaaccattttcctcattacatcccatgatcagacgaactctcttgttaagcttcacacctgaatcacgaagaagcttcatcgcataaagtgcttccataacaggtcctttatcatctgttgttccacgtccgtaaacgtaatctccttctcttgtcagcttgaatggatcatatgtccaatcaccgcctgccggtacgatatccagatgtcctgcgataccaacgatctcttcgccttctcccatctctgcatatccacagtagttatccaggttcactgtcttgaatccgagttcatctgcaatctgcagtgcttcgtgaagaacctttgccggtccctctccaaatggcattccttctgccggtgttccaagctgtgaatctatcgctacaagtctttccatattacttaacaattcttctgttgttgcatgaatcttttctttgatatccattattttcacctttccttttttatgttactgttcacacgatgtgcgaccagcaacgcatctcgccattttaaatcgcctttggcgatggggtgagatgcattcaagccaaaacatgcatcctccgtgtcaatcagcggagtgattgacacgggagtgaacagtaacttttttactgccttctatcatatgatgtaaccgggttgctccattgctatgcaattcccgcaatcctcgaacatcatcatatcatgtatcgtgaaaaatttccagtcttcccttaaagaaattgtcgacattttgtctataatctaggttaaacatttcttcagttttaaattatattctcttaataaattttacttttctttagctttcgtgacacgaggtgttcataattcttccgtataataacatcatcaagttgatacagatgaatgctaaagcaaacatgaatgttactggtcacaacaaaagatagctagtaccattccagtatcataaataaaagaagacggtgattgtattagcgacagatcttttatgattgccggacttcgaccaaaaattacgaatagtttatatagataatggcccggtgcagtgcaccgggccacgttttttatattttcttaacctctttttccatttttcagatcttccacgatttcattgtaacgctttttattcaaacgatagaagaacagtacaaccgctgtgacaatccacaaaattccgggaattgttgaaaatgcatgtttcataactgcaattacttccggattctgtacctgatttgccacatatccgtattgaccaagcagtgctgcaaggagtgcagttcctatagccattccgattttatttccaagagaaacaaatgcgtactggaatccatcatttctaagtcctgttttccactcaccgtattccacacaatccggaatgatcgcgtagattgcagtattaaatcctgaaaagaagaactgtgtaatacctgccaatgcatagaatacaattggagattcttttacattaaagaagaacattgcaagcatagcgattcctgtaagtaatgcaaaaacagatgctgttcttcctttattattcaacttacggaataccggctggaaacaagctgcaccgataattgaaggaataataatacacatggaatatgttgtataataggacgcatctccttctacataagtaaagtaatataaaatatctgcatttcttccatatagtgtgaatccgaacagcacctgtccaactaatgcaagcagatatggtctgttctgcataacggccttcagctgtactttaatggagattttttctttctccggaattgtcacctgttcttttgtctttgcaaaacagaagaaatgacatgcagcaaagatgcatccgtaaataattgcaacaaacagataaccgttctttacactgttgcttccaagcctgctgatcagtggcactgttacgatattgatgattccgattgcaatcattgctgctacggaacgagatgtgttgatcttggcacgctcatcaatatcctgtgtcatagcaccgcaaagtgttccatatggaatgtttacacatgtgtatcctaagacaagaagacagtatgtaattaccatgtaaactattttcgatgtatttgaccaatctgggtgcgcccagaaagaaaggatcaaaagcactgatgtgatcggtgctgccaccaacagccatggacggtatcttccccatcttgtgtttgttttatctgttaatccacctacgatcggatcattgatcgcatcccagaatcttgagaaaagcattaatgctgatactgccgccatactgattccaaatacatctgtatagaaaatcattaaaaagttactgacaaacatccagctaaagttacatcctacatctccgaaaccatatgcaatcttgctgatcagaggcacttttccattattgctctcgttttccattaattacctcctagccaaagtttctgataaaactctgctctctcttgattcgatctcctatttctcctgcacattgatgattactttcatcgttgtctcgcggttatcatcaatatactgatatgctttcagataatctttgaatgcaaatgtcttagaaatcaatggtcttaaatgaacttttccttcatttacaagttctataccatctacataatcatcatgacgatacatcatggtgctcttgatatccagttcgtgatcatttgcaactgcaaggtctactgttgccattcctgcaaatacggcaacaagaacgatgatacttccttttcttgcgtatttaattgcctgtcccattgtgatattatttcctgcgcaatcatagatcacatctgctttgtcaggaccaaaggcttccaccattgcctctccaaagtctttctccatagtattaacacatacatcaataccacattcttttgccttatccagacgaaggtcgctgacatctgtgatcattacctttgcggcgcccattccttttgctgcctgtgcaaccaggttaccgatcggtcctgcaccaagaactgcaatattcaatccctttacatctcctacctgcttcactccatgcactgcaactgccagaggctcgatcatggctccttcttcataagacatatcttccggaatcggtgttactttagaggcatctactgcaaaatattctgaagctgttcctgttgtctggaatcccataaccttaagttcctcacaaaggttatattttccgtggcggcacggataacactgtccgcagtaaacctgtggctcaatcgtaactttctgtccttcatgaaattctgtaacatcttttccgaccttggcaatctcaccggatacctcatgtccctgagtcaccgggtattttgtaaatggatgttttccatgatatacgtgaatatcagatccacagattccaatattcataatcttaactagtacctgatcatctttcacttccggaaccggtacctctctgaaaataatttctcccgggtttgtcattacctgctgtaacataatgttttcctcctttattgaatatcttttattaaatgttttattaaagtaattacattattgttcgagaaatgcattttgtcaatatgttattgttcaattctgcctattgcacaagatttcgctataatttttatgcagtttgcgcaaaacaaaaaatccagagaagaaacatgtgttaaaaatgtttcttctctggattttctaactctctatctttctaatcgttataatgttttaataaaagcctgtaaataatgttttgccacaccaactgccgaggcttctctcttatatgaacaaactttcaggtatctcgtatcatgatcaaatccattatattccattacttttttccctaaggttagcatatgatctgcaagatatccccctacttctcctccaagaataatatccatatcatatgccattctcagatttgaaataaggattgccagattattaagatactctttccaaaccttcacggcttgtccgtcctgctcttccaccttcttcataaactgttccagtgtctctttagtctcatctgtcagcacgctcgccgcacagtaagcatccgcacagccttgttttccacaataacatttctttccgcctggaacaaggatcatatgtccaaattctccggctttctgatttgctcccggaatcaatttcccgtcaatgcaaaatgctcctccgagtgtattattcaatgaaagatacaatgcatttctatagttatttaaatcctctgccatcattgccgcattggcatcattttcaaaataaaccggaagtgaaaagacctgttccaaaaagcttaaactataattctccaattggagcgcatgagatttgatcagcattcgttctttcgaattaacaattcccggaattgaaattccgattcccaagattcgttctctgtgttctacatctgaaagaaatctttccaatgcttcgctcaattgtaagtagtaagcggcctctgttgaaaattctaagcggatcctttcatatttctctatctcatagctcaaattcacaagtacaaatcctgcatgcttcgcagtgatccttatcccaaccgcataacggtacgctggattaatactgattcgttttgcttttcgcccgcctgtagattcatattctccagtttcaaccgcaattccattagccaagagctcattcacattcgacaatacagtcggcatactaagattgagatccttcgacaattccactttagacgttgcttcgtgatttataatatagtttactatttttgattttgtgatatttctcttttccgctccagccatatccaaggctccttttataaattattttataaaagtatcttatcccttctttgccggtttgtaaaggttagaaatccattttattcttctacttccaccggatttgtcacgctgaccttgtgatcataccatgttcccttttttccgatcaatgcaagatcaaattctttgtccagtgccggaaccggaacgtcgaatccatagacctcattagatgttccatcgctgtaattaatagtatctgttgtaggctgaagcagttctgcgccgtccttctgtgcatcctcggcagttccttcgaacagattgacaatatttttagacaccagacttatatgaattgtcattttcccatcctctactgtcagtgttccttttccatccattgcttcattcacatggaacatagagctgtctgtttggaactctgctgtatatgttccgtcttccagtgctgcctgctccccatctgccttatctgcagaatcctcttttgtatccgcctgttctgtttgtgcttttccactgtctttagcctctgtgctatttccacatcccgtaaatacagatgcgatcatagaaacagaaattaataccattaataacttctttttcatctaaatacttcctttcattgattcaaaaaaggtcatgcaattcctttttctctgaacaagcatgaccttctcaatatcttcttacaaattactctgcatcaattgcagcctgtgtatgtgctacatacagctgctggattgcctggatctctcctaaacctgcaatctgagtatcaatgctgtcaaatgctcctgatgcctcaaactggctcttccaggaatcatcgtcatctccggccatatcgttgttcgcatggtctcctgcaacaaccatcagcggacgaaggattactttcttatatcctgcttctttcagtttctcgatcactgcctcgcaggatgtatcttccggctcaccctctacagttccgataaatacattgtcatatccaagctgttccatctgtgtctgcatctgagaataacttacctttgcagtatgagatgtaccatgtcccatgaatacaaatgctgttccgtcttcttttactgcatccagactgtcaaatcctgcatctttaacagcctctgctgtgattgcttccgctactgctgccttatctgcattgataacagtcgcatcagctccaacctctccgagaagtggctctgcaatcttaacagattcaaacttatctttatatccctctaatgctgctgtaagttcatcatattctgctccatgcatcagatgtgtcggctgtacaacaaggttcttcactccattgtctacagctctctgcaatgcctgatccacattgtcgatcttctcgccatcacgggcctgtacgtgattgatgatgatctgtgctgtaaatgctcttcttacagaccagtccggataagctgcctgaactgccttctcaataccaccgatatctgtcgcacggctgtcattgaaggatgttccaaaacttactacaaggatttcattttcaccgatctcatcagcattgagcggatcatccttggatgcatctcctgtatctcttccgaaataatccggatccgcattctctccctcaacgagttctttctgtgcatctgtcaatgcatcccatgcttctttcgctgctgtacactgctcatctgtcttgtctgttctttcctgaacataaatgtcatcaatcagcttcgcaactttatctgctgcttcctgatcactgtcctgttttgactctgtctttgttgtgtcagtgttgttgtcgccctttgatccacatcctgcaatcatggacacactaagtgttgctgccagtaaaaccattaatactttctttttcattgtcatcctcctgatttcttgttctcagaaatgaaaacaccctcgaatcaaacgagggtacgcaaagaaaaaccggtgattatttacaacctatctgtaaataattactgcagtctaaatcattttctttcgtacggccaattcctcgtggcatgaactcttcattcctgtactgcgaaaggcaggtctcccggctgatcgttcaaacgcttctgcttcaccttcccggtctcccagtggtctcaaaacacaagctcacgaaatacggtgacgagttcgtacaggattctcacctgtttcccttttcaccagtccaaatttcccacgtcgttcctctgagcattcataatcaggacgccatcatccatctgactgacacctcacgcatctgtattaaattatatgttacaacggggtcattctatcacacttacataaatgcgtcaagaaatgttataaattggaggatttggcctcatttccgactttgatttcctccgcagaaatgatacaatatccctcagagacaaaatttgtaactagggtggtttattattatgaaagaatctaatagacaagcatttcgtcgtggttttcgcgatggaattccgattggacttggatatcttgcggtctccttttcaatcggtatcgctgcaagaaatatcggcctgaatgcatttcagggattccttatgagtctgttaaataatgcatctgccggagagtatgccggactgactgtaattgctgcaaactctccttatattgaggtcgcaattgtcacattgatcacgaatgcacgttatctcctgatgagctgtgccatgagtcagcgtttaagtcccgacctttcgttaggacaccgtctgctgatgagttatgatatcacagacgaactttttggaattgcgatcagcagacccggtactttaaatccttattatacctatggtgcgatgataactccgcttccgggctgggcttttggaactatgctcggtgtcattgccggaaatatcatgtcaccgcgtatggtcagtgcatttagtgttgccctctttggaatgtttatcgctatcatcattcctccttcgaagcagaataaagttgttgcgggactggttactcttgcatttatctcaagcttcgcagcaacttgcctgccttggatctccactctgtcggatggtaccagaacaattatactgaccgtcgtactttcagccggagcagcgttcttcttccctgtaccgacagaagatgaaacttcagcttcaactaagcaataataaaaacgtaactgttcaattactcagaaggaataaaaattatgacacacaacatttatatttatattcttatcatgggcggtatctcttatttaatccgcatactgccaatgaccttgattcgaaaacctttgaagaaccagtttcttcagtcctttctatactatgtaccttatgtcacactagcagtgatgacattcccggcgatccttcatgccacacagtctccaatctccggagttctcgctctcgttgttggagttgtagccgcatggtgtggtgccggactgctgccggtcgcagttctttgctgcgcagttgtatttattgcagagcttttcttgtagagtaatcttatagattttagtaactgtcgatgcccttttttctgccattgatgcttttttcgctactgtcgatgccctttttcgtttggcgaaacaaattttcttaattttctgacatttaagacaatttctttaaaaagtctaacgtaaaaatataaaaaaaggggttgcatttttctgtagctttgatataataaccatgttgtttgaaacaagcaacaaacaaaactcaagtaatgcggaatggtgtaattggcagcacagcagactctgactctgttagtaggggttcaagtcccttttccgtagctgggaatttgcttcggcaagttccctattttatcggagtgtggctcagtttggtagagcgctacgttcgggacgtagaggtcgcaagttcgaatcttgtcactccgatgttttaagagattacaatttgtaatctcttttttttgttgtataatctatctatacttgcacagaatgcaatttgttgggcgcaagtaaagtgagttagtccattataatatgattcggtgactattaattccaaaatctctaattcagtcagtcataaaaccagaagttgtatccaggttttaaaattctcaaaaacaggtcaataaaatagtaagatgtgttgactaaaaaccccaaaaatgaaatattagtcaacacatctctatatatacttgactatgaatacaaaaatcgaaaatctagtcaacacttctttatttcagctctccatcaaatacaacagttgccggtcctgtcatataaaccgtgttcttctcctggtcccactgaatctccaaatctccgccaagaagctttacagttacttcatcttctgtcaatccattcagaatacaggaaacagctacagcacatgctcctgttccgcaggcaagtgtctccgcagatcctctctcccaaacacgcatctgtacagtatgtctatccagtacttttacaaactctgtgttcacacgtcttggaaatctctcatggttttcgaattttggtccgatttcttcaatcggaagattatcaacatcatctacataaacaactgcgtgcggatttcccatagatacgcaagtcatatgatattcatttccatccacaagaatcggttcatctacagctttatctccctcagccacaaccggaatttctgccggtgtcaagattgggcttcccatatcaactcgaaccttcgcaacttttccattttctacgaaaagctgaagtgttttgattcctgctaaagtctcaactgtaatctctgttttgtcagtcaggccgtaatcatacatatattttccaacacagcgaactccatttccacacatttctcctctggagccatccgcattatacatggccatctcacagtctgccacttccgacggacagatcaggatcagtccatcagatcctattccaaaatgtctgtcactcacctggattgccaacgctgatggatcttctaccttctcttcaaaacagtttacatacacataatcatttccaattccctgcatttttgtaaatttcattctcttctccgttccactgtcatcactgacagtcctctcatttgttattgtttacagcacttcttattcgttactgttaacagctgcctcttattcattcataattgtcagcaccatctgtgctgtttcgagcatattggtcccactttccatactgctcttctgtaaatatcgatgtgcttcctcttctgacatgttatttcgttctatcagaagcgctttcgcctgatcgattatctttctctgagaatcgtctctctttcgtatcgtttctctgcgctttcttctcttcctgctctgtgtctgctgaatcatttcaacagtatttaccaaatcataaactttgattgggagtggaagtcctacaacgccatccggcagtccatccatccacttatctgctgaagccaccaaaagcatatcaaacgcatccggaagagattctcgcaaatctatatattgcatatcttgaaatcgataaccgcacacgacaattccatcactccagttatcagcatactgcaaagccttagctcctgtcaaacacaccgcagatacttcaatacccgcacgaaccaaactattacggatatttactgcattttccctctttgggaaaacgacaataatgttgctcatatctgctcacctcttccgctaactactcttctatcaatctgttttctataaaatgttctataccaacatatgcggtctctaaatgcccaatgccaggatacctgaactacagcctgtaaagataatgattaatctcccagtctgttacctgcatacaatattctttatattctttcttatttgcttttatgatcttctcggcaagctctttccctaatacgctgatcagcagttcatctttctcaagctctgctgtagcagccccaagcgttctcggcagttcttccacttgaagttcatctcttctttcctgcgtcatcttctgaatattttcatcaatattcttcggaggcataatctgattcttaattccgtccaccccggctttcagaagtactgcaagcgccagatatggattcgccgtagcatccggactacgaagttccagtcttgaattgtcttctttttccatagacacacgaatcaaaggtcctcttgtcttagctgaccatcccatataaacaggtgcttcataccccggcacaaaacgtttatacgaattgatcgttggatttgtaatacaggtgattgccttcatatgtttcatcaagccaccaataaaataatatccttcctggctgagtccattctcatcctctgcgttataaagtgcatttgttccatcgtttttatataaagacaaattaatgtgcattcctgacccataagtctcactcttcggctttggcataaatgtcgcgtgcagaccgtgtcgttttgcgattgtcttgacaaccatcttaaatgtcatcagattatctgctgtaatcatcgcctcatcgtagtgaaagtcgatttcatgttgcgccggcgcaatctcatgatgtgaggaaataatctcaaaccccatatcttctaatgttaagatcatatctcttctcgcattttctccaagatccaatggccctacatcaaaatatcctccctgctcgtgagttactgttgtcggtctgccgtcatcatctgtatggaaaagaaagaactcgcattccggaccgacattcatcgtatatcccatctctttcgcctccgcaacagcctttctgagtacataacgcggatcgccttcatacggtgttccatcttttttatacacatcacagatcagtcttgcaacttttccctgctgtggtctccatggaaagatttcaaatgtactcaaatccggatacaagtacatatctgattcctcttcatctgtaaccccttccaaagaagaaacatcaaacatacaacgattgtccaatgccttttcaagctgtcctactgtcaccgccatatttttcatcgttccaaaaatatctgtaaactgcaatctgatgaaagcgacatcttcttcctctactatgtgaaaaatatcatctcttgtatagttatgcattattttcaacctcctttatcataaactcatacgataaaagggcgttctccacctaagttggaaacgcccttgtttctgtgttacattataatgattgactgttttcttgtcaattatttctgaatcagttcaagcacttcttctttgacaggcatagctttgatcgcacccttctttgttgttacaagtgctgctgccgcattcgcaaatgtcagcatctctcctaactgttcctctgtcagattctcaaaatcatgatcaaccagataattcaaagaacttccacagaaagtatctcctgcaccggttgtctcaattgctttcactgaaaatcctggtctctctacgcgcatgcctttgtaataagctctgcttccgtcttttcccatagtcagaagaatcagcggaatattgtatgtctcctgcagatatgcgattccctcatcatagtcttccttaccggatacaaactgaatttcattatcagagatcttcaggatatcacattttccaaatccatactccatctgctcttttgcaagatcaagagaactccacagcggcggtctcagatttggatcaaaggatacaaggcaaccatttgcttttgctgtttctaccgctttctttgttgcttcacgcacaccttcatgtgtcatagaaagtgttccgaaatgaaagacttttgtatcttttactacttctggattcacttcatctgctgtaagcatcatatctgctcccggattacggtaaaatgaaaactctctgtctccatctgggaatgtatgtacaaacgcaagtgtcgtattcacattttcgtcaaccatcagattggaggcatcgattccggcttccgtaatcgtatctcttaataacgttccaaactgatcttttccaacttttcctataaatgctgtcttctttcccatcttgttcagaagcgccagcacattacacggtgcacctcccgggcaagcctcaaacatattgtttccctgttcgctttgtccattcattgtaaaatcaatcagaagttctcctaatgcgattacatcatatttctttgccatgaagttctcctcctatttcttgtcttattactttgtcttattgcttgtcttaattaaaatatactaactcttcaattggttctgcaggctcaatattctctgcctcaagcaccggtccttctccgccgtatacggacagattcgcataacgcacttttgcacaaattttcacccagtctcccgcattcagcttcggcgcataagcgcttctgcaaacatatccaaggaaagatgtatcatctgcacagcaagtcattgccatacgccccggatagaataccttagacggaaatgcttttggtttcataacctttgcaacaaattctacaacttttcctttatagcgctccggatgctcctgcatatcaatataccagataccataatcttctcttggaatctcaatcacaggtgctttgagatcatacggcacttcgtcttcaaagatattgtctacctcaccgttctcatcctcaaagattacttctgcctgaggacttacaaccttaacacttctgcggtatcctgccaacggtttcttatcttcacagcgattaaacagcacaagttcagctccctttaccatctcgacaaacagtggttttaagtttgtcagatacatctggaatgtactcgcatctactgttgtaatcttctgctcgatagcccagcctgccggaagcttcatcttctcaaattcactcacctgccacatgccattatattcaataacaacacgttccggctcatgcttcttattcatctcttccagccattcttctgtcagatcttctttatcttctacagtctcaataacgacaccatacttcagcatttccattggatcatactcttcttccccctcttcgcagagaatcagaagtgtctttccatcaatctgaaagtaatcctgagatagtgtaaaattcaggaactgagttttaccactgtccagaaaacctgtcatcagataaaccataacatctggctctttcatcatatctatctccattccgtctccttttcgcagaagacatctgttattacataatgctacgcagccccctatggggtactgctttgcttattctcttatttcagcttaaataattctgcaagcttgtcttcgttaagctcagctccgatcacacagattcttcctgtgtattccggtgctcctgttcttacttcatgctcctccggaaccatatcaaagtagatccactctccatctgctcctgctaccattccttttgcacggagtacatttccgtaagagccatcctcttcaagagtcttcagaattgcactgacctcatcctttgtataagtatgaattgtctctttaccccagcttgtgaatacctcatctgcatgatgatgaccctcatgatcgtggtgatgatggtgtccacagccgcagctgcactctccatcatgatgatggtgctcatgcccttcatgatcatggtgatgatgctcgtgctcacactcttcatgatcgtggtgatgatgatgctcgtggtcacactcttcatggtcgtgatggtgatgctcatgatcatgttcttcatggtcgtgatggtgatgctcatgatcatgttcttcatggtcgtggtgatgatgctcgtgatcgcactcttcgtgatcgtggtggtgatgatgttcatgatcatgtgcttccttggctacttctgcgagtaactcatcttcaagagatttgcttgattccattgtttcaagaatcttctcgcccggaagctgctcgatcggtgttgtgatgattggagctttttcattcagttctcttaacagtgcaacactttcctgaatcttctccggttttgctttatctgtacggcttaaaataactgcacctgcatattcaatctggttgctgaaaaattcgccaaagttcttacggtaaatcttgcactttgttacatctacaactgttgtaaagctattgagctctgcatcgatttcaccctgaacatcctgtacagccttgattacatcagaaagctttccaactcctgatggctcgatcagaatacgatccggatgataagtatctacgacctcatgaagagattttccaaaatctccaaccagtgaacaacagatacatcctgaattcatctcacgaatctcaattcctgcttccttcaaaaatccaccatcaataccgatctctccaaattcattctcaatcaatacaacctgctctcccttgtatgcgtcagaaagaagcttcttaattaaagttgtctttcctgctccaagaaatcctgaaataatgtcaatctttgtcattgttctcttctcctctttctattatttcaaatccaattcaaccgggcaatgatctgatcccataatatctgtaagtatcttcgcatcgtccagtctgtcctttaaactttccgagacacagaagtagtctatacgccagcctgcattcttcgccctggcactgaaacgataagaccaccaggaatagattcctgtctgctccggataaaagtaccggaatgtatcaataaatcctgcatccagaagttcagtaaacttctgtctttcctcatccgtaaaacctgcattcttacggttggtcttcggattcttaagatcaatctctttgtgcgctacattcatatctccagtcacaatcaccggctttgtctcttctaacttcttcagataagtgcggaagtcatcctcccacttcattctgtaatctaaccttgccagcccattctgagaatttggtgtgtatactgtgacgaaataaaactcttcaaattcacacgtaatcacacgtccttcctggtcatgctcctcaataccgattccataactcaccgacaatggttctttctttgtaaacacagctgttccggaatatcccttcttcacagcataattccaatactgataatagccttctaattccagatttagctgtccttcctgcatcttcgtctcttgaatacagaagatatccgcatctgcctcatgaaagaaatcaagaaatcctttctgtacacaggcacgaataccatttacattccatgatattaatttcaatacgctgcatcctccctttcaagagtgttgctgttcaccgtccattcgccaactcttctgtgaataatcagcaactttccataaccgaatcaataatacacctcatcaaggaataaccctcttgcaggtgctaaaaatccagcctgacttctatcttttgatttcaaaggttccttcacactctctatgcttcgtgctccggttccaacttccagcaaagttcctgtcaaaatccttaccatatggtaaagaaatcctgttccttcatattgaatactgactttgcttccttgtccgcaaatcattatagcataaattgttctttttgtggacttttcatcctttttatccgtatatccggcaaactcatacgtgccaatcaacaattgtgctgcctttctcatcgcatctaaatccaattgctgcggaaaatgatatgtatatcgtctcgtgaatacatctggtttctctgccagatcaagctgataaatgtatctttttccgaccgcactttttctcgcatgaaatccattcctcacaagctctgcatctaaaatccgaatatctccgggtaatcttgaatttatcttttctgtaaaaaatccatcctccacctgaccagaaagaactactgttgcagtctgtccattcgcatgaacacctgcatctgttcgtcctgaaccatcaatctccactggatatcctgccactgacgaaattgttcgctccagagttccctgcaaagtgttctctgtgtttgcctgtctctgccatccctgatatgcagttccgtcataagcaattgttaatttataagttctcattctcgcctcccgtgtaatatactaacattctccgaaagattgaaatcggttatactcacgaacagagtataaccgatttttattattttagaaatttcttcaattcatccatgaatgtattcgcatctttgaactctctgtagacagatgcaaatctgacatatgcaaccggatctaatgccttcagattctccataacaatttcaccaatctcactgcttgggatttctttctcttcacgattaaaaattgacagttcaatcgcatcaattgtcttttgaatctcttcagccggaaccggacgcttgtagcatgcattcagaactccattctctatcttcgctctttcatactgttcacggttattatctttcttaattacaatcagtgggatcgtctctaccttttcataagttgtaaaacgcttaccacattcatcgcaagaacgtcttcttctgatagaactattatcctctgctggtctggaatcaatcactcttgtatctggattgccacaatatggacacttcatataatccactccgcctttccacgtatcttattgctttcattatacacaatgtctaatatttttgcaaaaacttttcttctttaatttccacaagaataatatccggtccaatcttctttatacatgcaaatggtatcacatattcgctatccgttccaaagaatccacagaactttcccggcccaggaacaatcaatgcttctattgcaccggagcattcatttatctgcagatctactacacctccaagacattttccattacagatgttcactacctctttttcttttaattcacagaatctcataggcattattccatgattgccgatactttctcttaactattctatgcatgaaatcagaatctgttgtataataaaactcacatgaacataccagattggagcatattatttatgaaagaactttctgctgccgaagagacttatacgagggaagatcttcctacgccgttcttcgtcttctgctttctcactttctctcttcctctatagtcgtgaaatctgcacgatatctttgattggaattgcggtcctatcttccaactcgaccgctttttcatattgtctgattcttctcaccttcccctgaacagttcgatattgaccaccttccttcttctggtctgcacagaaatacgtaatcttcacatccggatttgtttccctatcgtcctgtaatcgtttcttaagatattgtaaactttgatctaaccgttccagttcctcctcatccagttctactctctgttctgtaagtcttgcttcttccttcacgacctcttcgtatccggtcaatgctgagaacggagcgaactgtgccgctctgtctatcaacggcattgatggatgaacagaagatacgtgatgcggacaatctaaaatatcatcatatttatgctttgtgtccgccgatttgtctgtttctctcaatagttgtcgctccttcctgcagattcattcccttcagcactgcattctttccaaatttcttcttgagttcaaggactgcctgctgcatgcttctctcacgctcccgttcttctttttcccgctgattttgttcttccttcgcttgataatctgtaaaaagatccatctgttcatacgagtccgtctctgcaatctcacattcctgtatcacatgattcgccgccagtgatatcctgcgtacaagcagtttggtatccacaatcctttgatacagttctaccgttgcatccacaatttttcgtgtagaagacgtatgctcttccaaattcattgttccatgtgcatgcttcggaatctttctcccataacggtctgtctttatctcacctcggtaattcttctgaaattctgattgtttcagattttcaatatcgtatcctactgtcagtacaatctggttagtcacaagccctttttcaaccagatccaataccagtaattctgtcatctcccgaacaatgagacctgccttttcataagaatacggacactgcaatacctgaccggaaccgacactgttcgatgaaggcttgtaattcttaattgcctccatcgtacacggctcccagccccaggcatggtcaatcaggagttctgcattcacgccaaataaacgatacaatagttcttcattgtaaaactcctgtgcgctccccattgaacatctcgcaatatcccccattgtatacagaccattctcctccagcttcttcgcatatcctcttcccacgcgccagaaatctgtcaatggtctatgattccaaagttgttctcgataacttcgttcattcagcttcgcaattctcactccatcttcatcaggttcgacatgtttcgccataatatccattgcaatctttgcaagatacagattcgtcccaatcccggcagtcgctgtgattccagtctcatgaagtacctcccgaatcatcttcctcgccagttcttccgacgtgagtccgtaagttttcagataggaagttacatcaagaaacacttcatctatggaataaacatgtatgtcttccggcgcaatatatttcagatagattgcataaatcctgcggctgtactccatataaagagccatccttggtggcgctgtcacgtaatccaatgccagctccgggtgtttccttaattcacgctggtcagacgaacttccctgaaatcttccacccggacttcgataccgtctcgcctcattcacttccgctactttctgtacaacttcaaacaagcgagctcttcccggaatcccataagacttcagcaccggagataccgccaggcagatagtcttctctgtacgggtcacatctgccacgacaagattcacctccaacggatccagatcccgttccacacattccacagaagcgtaaaaagatttcagatcaattgcaatataggtgcgttctttcatggcatattcccttcctttcgttgatgtctctattatatagaacatatgttcgtctttcaagtaggattttcaacatattttgcgatgcatatttgtgcattttgttgtgaacgggtaactcagattgatgagaaatacttgtttccaggataccgcaacgagaaaaagataaaccatctgtttcctgtagtttttcaacaaaagaagccttacgatcaaacctcctttctgtctgatcgtaagacttcattttctcttaaaaacttgtccgataaatcggcaatgcattgattaccggttcctcgtatggatgtacctctttgattgcctgaatagtttcatccactttctctgtaaatacagttacctcaacttttacttcaggttcacaactgatttcacctacatttccaatataaggagatgtcccgcctaacggtctccagtaactggtaagctgtgaacatgacatacatgaatcataattgcctatatgaccggcatctactgactgtaatgctttctgtagctgcgaaatatgtgtttccggaataaagatttctaatttgcaatacttgaaatccatgcgatgcacctcctcaatgcacaaataaaatttatatcaaaatcccatcgcaatgatctatttcatgctgaatgatctgggccgtccatccgctatatttctcttttttcttcttgaaattcatatcctgatattcaacttctatttcctgataacgtctgcagcttcgcactccgtctaatgacagacacccctcttccgtctcataagcgcctgtgcgcttcacgattttcggattaaacatagcaatattaaacatccccatattcactgcaatgattctcttttttgctccaatcatatttgctgccatacctacacatcctgcttcatttgctttcaatgtatctaacagatcgattgctatctgtttatctgattctgtcaccggttctgctttttgatttaagaaaaatatgtctctcataataggcttaatcatacttttttacttcctttccattccctgtaaaccattctatttctacagaaattttttcttctgttgctaagcttacataatattcatctatacatcttgtctcaataaaatattcctttactttttcattttcccattctttactaaatccaatgccttttactttcagcttcgcttctagttctgtccataattgagtaaatatccggtctttttcctccccgcaaagttcagacattgcattttgtatttcattcgaaaatatcttcttcgctgttgcttcatgatatggacgcacacgttcaatatcaatgcccacttcctgatcagcaatcgctagaactacatatttaccgctatgtgacaggttaaaatgttttcttgcatccacaagcatcggcttcccatttttacttattacaagctgagcatcattttctacacctaaatactcttttaaaagatatcccgctatcagctcctgttttttatccgtttctctcttatgcttctgatacttttcaacatatctttgtgctatctgtgagagaatccactctttattgcatgatattttttctatatcagctattatgattcttcccttggtcatttattgtcccatcttttctatatacttttttcaagaatgccaccggcattttgccgtgagacacacaatcttcatctgatatatacatatagcaaaatcttttctttgtcaagaaacttgatttttttgcaagaaaaaaacagcgctttcgcactgcttctcattcctgtctatattccatgtaccttcaaaactacatacagtcaaaaccaacatcatcatccaaacctatcactgctttggttatgccctcgacctattagtaacagtcagctccatgtgttaccacacttccacctctgccctatctacctcgtcgtcttcaaggggtcttactaacttgacgttatgagatatctcatcttgaggggggcttcacgcttagatgccttcagcgtttatcccttcccggcttggctactctgctatgcctttggtaagacaacagatacaccagcggccagtccatcccggtcctctcgtactaaggacagctcctctcaaatatcttacgcccacgccggatagggaccgaactgtctcacgacgttctgaacccagctcgcgtaccgctttaatgggcgaacagcccaacccttgggacctacttcagccccaggatgcgatgagccgacatcgaggtcgccaaaccactccgtcgatgtgaactcttgggagtgataagcctgttatccccagggtagcttttatccgttgagcgatggcaatcccactttataccaccggatcactaagtcctactttcgtacctgctccacccgtcggtgtcgcagtcaagctcccttctgcctttgcactcttcgaatggtttccaaccattctgagggaacctttgagcgcctccgataccctttcggaggcgaccgccccagtcaaactccccacctgacattgtcccccagccggatcacggctgctggttagaaacccagtactgcaagggtggtatcccaacagcggctccatggcaactggcgttaccacttcttagcctcccacctatcctgtacatgcaataccgaatcccagtatcaagctggagtaaagctccatggggtctttccgtcctggcgcaggtaaccagcatcttcactggtatttcaatttcaccgggtgcattgttgagacagtgcccaaatcattacgcctttcgtgcgggtcggaacttacccgacaaggaatttcgctaccttaggaccgttatagttacggccgccgtttactggggcttaagttcaaagcttcgcttgcgctaacctctccccttaaccttccagcaccgggcaggcgtcagcccatatacctcacctttcggttttgcatagacctgtgtttttgctaaacagttgcttgggccaattctctgcggccatcttactggcactccttctcccgaagttacggagtcattttgccgagttccttaacaatgcttctcccgtcggccttaggattctctcctcatccacctgtgtcggtttacggtacgggtatcctgcaaacaatagcggcttttcttgacagtcagctcacgtgcttccctacttattttcagtccacatcacgtcttcagattgcctggcggatttgccaaccagactcctacctcgcttgtaccggtctttccattcccggctcacgctctctgcctgtgtccccacagttctgttacaggatagtacaggaatttcaacctgttatccatcgactacgtctttcgacctcgccttaggccccgacttacccagagcagatcagctttactctggaaaccttagatattcggccggaaggattcccaccttcctctcgctactcattccggcattctctcttcttaaaagtccacagctccttacggtactgcttcgtccctttaagaatgctcctctaccaattgaattaattcaattccaaagcttcggcagtgtgttttagccccggacattttcggcgcaggacctctcgactagtgagctattacgcactctttgaatgaatggctgcttctgagccaacatcctagttgtcttcgaaatcccacatccttttccacttaacacacattttggggccttagctgttggtctgggctctttcccttttgaccacccaacttatctcggatcgtctgactcccatacatcatctacacggcattcggagtttgatatcccttagtaagctttgacgcccccttaggaattcagtgctctacctccgcaagactcgtatgaggctagccctaaagctatttcgaggagaaccagctatctccgggttcgattggaatttctcccctatccacacctcatccccacccttttcaacggatgtgggttcggtcctccattgccttttacggcaacttcaacctggacatggatagatcacccggtttcgggtctactccgactgactatgcgccctattcagacttggtttcctcttcgactccggacctttagtccttaacctcgccagccagcgtaactcgccggaccgttctacaaaaagtacgcggttgagcatataaagctcttccacagcttgtaaacatatggtttcaggttctttttcactcccctcccgggtccttttcacctttccttccacagtactatgcgctatcggtcactaagtagtatttagccttacggggtattcccgcatcttcccacaaggttccacgtgtctcgtggtactctggatcccgccatgtcaactcgtctttcgcttacggggctttcaccctctctggccggctttcccaaaaccgttctgctaaactcgttgaatcaattccgcggtccgaaccccagcatgcacgcacgctggtttgggctcttccgttttcgctcgccgctactcacagaatcacatgttgttttctcttcctccggctacttagatgtttcagttcaccgggttcccttcctaacgttatgtattggcgttaggatacttgaggtttgctcaagtaggtttccccattcagaaatctccggatcaaaggatatttgctcctccccgaagcttttcgcagcttatcacgtctttcatcggctcttagtgccaaggcatccaccatacgctcttatcagcataaccaactcgacctcatcccacgggaatgggataatgtccacacatacatagcgttgtatgcgttggtgatagtcaatttattttaagtctgttttcttcagactgtaagttaatgttgttaacattacctcggatgtcttgattagatatttatctaaatctattgatttttactatatgcagttttcaaggtacataaagatgcgagcgtatcgaaaacagttgtacgtgacaagcttgcttctctaagtgcaaatgcttttcgatgcattggcatgtaatgccatgagcgataaaaccgtaggttttagagcttcgcatcttgaccgactttcatcagtcattacatacacaaatctctttgtatatctaatcactggtgaaaccagctatcataacagcactgccctgctgattgggttggcggcgataagttgttgctcatctgtgcctgtatctatatattcaacttcggcagcgtctctgccttagtttctttttttatgatttggcggccacctactctcccacaccgtctccagtgcagtaccatcggccgcttaggtctttaccatcgtgttcgggatgggaacgggtgttacccctaagcgcatcgccaccaaaagctttaggttacttgataacccaacaatagacaacagtaaaaactctctacttttttcttccttagaaaggaggtgatccagccgcaccttccgatacggctaccttgttacgacttcaccccagttatcggtcccaccttcggcagctccctccttacggttgggtcactgacttcgggcgttactgactcccatggtgtgacgggcggtgtgtacaagacccgggaacgtattcaccgcgacattctgattcgcgattactagcgattccagcttcatgtagtcgagttgcagactacaatccgaactgagacgttatttttgggatttgctcgacctcgcggttctgcctccctttgtttacgccattgtagcacgtgtgtagccctgctcataaggggcatgatgatttgacgtcatccccaccttcctccaggttatccctggcagtctctctagagtgcccggccgaaccgctggctactaaagataggggttgcgctcgttgcgggacttaacccaacatctcacgacacgagctgacgacaaccatgcaccacctgtcttccctgtcccggaaggaaaggcaacattacttgccggtcagggagatgtcaagagcaggtaaggttcttcgcgttgcttcgaattaaaccacatgctccaccgcttgtgcgggtccccgtcaattcctttgagtttcattcttgcgaacgtactccccaggtggactacttattgcgtttgctgcggcagaccgaacagctttgctgcccgacacctagtagtcatcgtttacggcgtggactaccagggtatctaatcctgtttgctccccacgctttcgagcctcaacgtcagttaccgtccagtaagccgccttcgccactggtgttcctcctaatatctacgcatttcaccgctacactaggaattccgcttacctctccggtactctagattgacagtttccaatgcagtcccggggttgagccccgggttttcacatcagacttgccactccgtctacgctccctttacacccagtaaatccggataacgcttgcaccatacgtattaccgcggctgctggcacgtatttagccggtgcttcttagtcatggcatcgtcattttcttccctgctgatagagctttacataccgaaatacttcatcgctcacgcggcgtcgctgcatcagggtttccccccattgtgcaatattccccactgctgcctcccgtaggagtttgggccgtgtctcagtcccaatgtggccggtcaccctctcaggtcggctactgatcgtcggcttggtaggccgttaccccaccaactacctaatcagacgcgggtccatctcataccaccggagtttttacccctgcaccatgcggtgctgtggtcttatgcggtattagcagtcatttctaactgttatccccctgtatgaggcaggttacccacgcgttactcacccgtccgccactcagtcaccaaatttttcattccgaagaaatcagaataaggtgcttcgttcgacttgcatgtgttaagcacgccgccagcgttcatcctgagccaggatcaaactctcgttaaaagtgtttgtatccagttcagaaccaactaactagctaattcttccctttttactgttgttttggtttgtttaaaaaccgttcttaaaaatcttctcttaaagaaattttcaagggttgttgttgtctattgttcagttatcaaggttctttgtttgtgtcgttcttttcaagcgacagcttttatattttatcaaaagcttttgtctttgtcaagaacttttttatttttctttgtcgctcttttcgagctttcctttgccgtctcacgcgacagcttatttaggatatcactttcagaactctttgtcaacaacttttttgatttatttttcaatcatttcattgatttttaaatctctaagtttccttccgatcaagaatgttccgcctccgcgtcttcttttatcttccgttcctctgttgttttctttgctgttcctcagcgacgaatgttatcttatcacagccatttttaattgtcaatgttttttatatatttcatgcaattcagactattctgacaatttatgtgaacagagaaattacaccaccttttccacagccaatggcaggtataagcggcacaccttgtgaaatccattatttttctgtataatcaatctcatctatttatttcacttataaaggcacaggagacacaatatgtttcattattatatgttcaacaaaccctttggctgcgtcactgcccgccgtgatagcctttacccaaccgttatggactatttttcagagttaaacaatgataatttaaatccggttgggcgattagaccgagaaaccacaggactcctcctcattacagatgacggagttttcaaccagaaacttacgcacccttcttatcataaagagaaaacctatcattttacagttctaggtgatttaaccgaggatcggtgccaacaattagaaaaaggaatcctcttaaaaggatcccccgttcttacttctccggcaaagcttaaagtctttcgccaggatattctttctaatataatagacacgctgcatccggaagtacagagtgctgtgtgtaataatcttcctactcatccagtcacttacggagagattacgatcagcgaaggacgtaaacgccagattcgccgcatgatgaaagccgttcactgctgcgtgatcgaattgaaacgcatttctatagaagatatcattctcgatgagacactttctcccggggaatggaaagagatttttccactataataggaaaaatctcttttatcttcggatatattttaaatccagttaaagtctccacccgtaattgccaggctcagaagtgcatccatcttctcaacttcctcttctcctgtaatcttctctaccagcactgctgtatcctctgccgcctctaaagtttcatctggtccaatttcatagtcaatatccatcccgcaatccggacagggaattgtattcattgtctgtaaagataaaaatcgacttccacattttttacattcataatatccgcactcttttgtgccatctggtacataatacatatttttctacctcactctctttacaagtatttttatcttatcactcaaaaaagaggaccgcaagtaacttatttcattacccattccttgactttatcattcctaatatctgtaatcaaaaatcaattcatttttcttgacaaacccatctcttttatgctatatctactataactctttgcactgcatataaatctacagtacaaactgagcagaccgtgatatcatatcatggagtcgggtcgcagatgcgacagtggaatctttcatccgcgggacagtagttgctaatactgattcgtgggtgttttttattttaaaacaattctttcattttcccacatatatttagtgccatagagctatctttcacttgttctattaaattggaggtaacacatatggaaaacagcacaatgaaaaccggaaatcccatcgcaaacgaagaagatttccaaaaagtagccaataaagtctctaccattacaattattggaaacgtcgctctatccctgctcaaactttttgccggaattgttgcgcattccaatgcgatgatcagtgacgccattcattccgcatcagatgtattcagtacatttgtagttattattggaatcagactcgcatcaaaaaaacctgacaaagagcatccttatggacatgaacgcctagagtgtgtagctgcaattgtccttgcgattgttcttctcattacaggtcttggaatcggaattgaagcattcaaaacgatattgcagggaaattctgacaacatacaaacgcctggtatcttagcattgattgccgctataatttcaatcatcagcaaagaggccatgtactggtacaccagatatcacgccaaaagaatcgattccagtgcactgatggctgatgcctggcatcatcgttctgatgcattttcttccattggtgcattggtcggaatcgccggttcaagacttggttttccaatcatggattccattgccagcttagtgatttttgtatttatcgtaaaggctgcttctgatattttcaaagatgcaatcgacaagatggttgaccactcctgtgacgaagaaatggagactcaacttcgtgcctgcgtaatgcgcaatccaaacgttcataagatcgatgtacttcgaactcgaatttttggaaataaaatctacgttgatgttgaaatagctctggacggatccatcacgcttcaggatgcacatgatgtggccgaaaaagtgcataacgatatcgaaaagacttttcctaaagtaaagcatatcatggttcatgtaaatcctgcaaaattataagtaacgatctttgcctttccatgaagaaatccccgtcaatgacgaggatttcttcaaaatggatggttcatttaatcatgttctttaatatattgaaatacctttttgtcactctttgattttttataccatccaatacataccattataattccaacaataataaccgtagttcttaccgatgaattcggtgaaaataagcaagatacaataattccggtttcagcacctgtaaaaaaatctacaacagatttttcgtgctttattatccccattactctttctttgtctatagattctaccatttttgaatcctcctttaatgttattatccaaaaaataatgttaaaagtaaagcaatcatcacattacattgcgtatatagttgcgcaaagattactgttcactcccgtgtcaatcactccgctgattgacacggaggatgcgtgttttgacttgaatgcatctcgccccatcgccaaaggcgatttaaaatggcgagatgcgttgctggtcgcacatcgtgtgaacagtaacacgcaaagattctttgacaggtgctttttctctctttttgaaactttttacaccataaattcatctaataagtatcaatcggttgagatggagcttaaaaacaattgaaagaaggtggcgtataaaatgaaatctcttgtaaagcgggcgcagaggggagatgatcaggcgttcgtggaattgatagaagaaaataagcaggccatgtataaagtagcgatcggtattttaaaaaacgattctgatgcagcagatgcaattcaggaaagtatcctcacttgctatgaaaagctgaaagaattaaaaaaagcacagtattttaagacatggctactcagaatattgattaataattgtaatcagatgcttagggaacagaagaaagtagtcggtattgaagcgtattatggggcagaagatataaaaggaaagaaagcagaagaaaagattgcagcaccactgggagcagcgacaatcaacgaagactttctagagctgttagaccagatggaacagcaatatcgggttgtattgattttatattatgtagaagagatgagcatccgggaaatcagtcaaatattgcagatgaatgaaaatacagtgaagacaagactttccagagggcgaggagtatataaaaaactctatctgaaagaacacccggaatttcaatttgagtaaagcaaaaattcagacaaaaatagaaaacgtgagcagaaaaggagggcttgagaatgtcatttgaagagaaaatgaaacaggatttgaaaaaagatttagaaattccagagattgtagagcaaaagattcaagatgcatataaagaaatcggacaaggaaagcttagaatgaagaagccagataacaggaatcagaagagaaagaaagtgtggacagcagcggcggcagctgtggcggtgatcgctatatcaggaacggttctttattccaatccggtactggcgaagaatatcccggtgatcggagatgtctttgcaaaaatgcaggaaaacagggcgaaggatccgtatgcagggaaagataagaccgcctatgaaaagattgaagatcattctgtaaatgtgcagactccgggatcagaagcagaagataacggcgtgacagtaacggtatccgatgcatactgtgatggatatgaaatgtattttacgatgacagctactacagacaatgagcagatcaatcagaagaaatatctgctgccggataaaagtcaaagagtgcaggttgacggagtggaatgcggtgcagaactttgtctggaaaaagcggaggacggaagctttgtaggtcttggacacatcagtgcagattttctgaagaaaaaggaattttcagatcagtcaacggtagacatacagtttacccagctctatggaaagggagaaaatgagctgagcacaaccaagtatgtggagggcgagaatctgatcagcggagagtggaatctcaaattcacagtgaatacggatgccagcaacaaccagacatatgaagtaaatgcggagaataatggattcaaagtgagtaagattgtaaaagtgccagcatccacctacctttatcttgaggtgccggaaacatatgaaaatgtacagatgattattacggatgcagatggaaatgcactcgagaaattcggaggtacttttacagatccggaaaatggagtgtaccagatcaagatgcagtttgagcagacggatacagatcagattcatgtgcaggttgtagatatggatcagagtacgaacgataatctagtcatggttgcagaaatgacagcagatctgaattaaacaatagtcatcttctatagtaacatgctatcttttcggggaatgataggatggtcacaacagagttagttcggttgtgacctctttttcttttttattcatcctattttttctttaccagtttatgctagagaaattaatatcacactcttgtaatatactatatcgtaattaaatcttttgtacctatcttatagcacttgctatttctcaaatccaacatttgttccataacagctatttttgcatacatagtatttgcatttcttcgtggattgcaatcttccttttttattatttgtttctcacaagccgtataaaaatcaactatactcaatgttttactttttattcctgccaaatgcataaaattattttttccgtatcttacttcataatagtcatatacatctgactttttctctctaaatatgaataataaagtagtgtctgcatactctgaatataacttttgattggttccgcacttggacatttcgatgaaacagaaaccagagtggataaaaaactctggtgagttcatgatgcctcaaactgtgaatacacctatcttgatatcagtcccaaacgtggaagtgcaggcatggaacaatgcggtgttctcccggaattcaaagggattgccatgcatgactgctgagcttcctactggaattattcagatattcagcatgcagtctgctgtgcccatcttctccgtgaattaacggggattgatgaaaatcatcctgaaggtatgagtgcccatgatatcaaactcatgagtgacaatgaccttttggatatggactattttcttcatgaatttgatgatgatgacgattttggtgaagaaggcttttatcttttctaacaatcgtctatttcctatgcctctttttttatggtaagcgtcaaataaaacagtgtatagaaaaataaccgtcagccttttatactaaaaggtcaacggttatcgacagaattcttttacaagaggattccaaggcagataatcatccagatattcaggatgttcaagaaaagcactccccggcatgtcggacaggatatattttatatatttcatcggggcaagcccattcgctttcgctgtctctaccaatgtatagattcctgcactggcttccgcccctttcggactgccggagaatagccagttctttctgccgatcacaaagggacggatacagttttccgcaagcgaattactgatggaacaattcccgtcttccagataattccaaaaaccttcacggttatttaaggcgtaatgaaaagcttttgaaagtttggatttcggcagctctccgatggcacttttttctgcccatgaccaaaaagcctcgagaagaggtttctcgcggataagacgttcttttttcttctgatcaggagggaacgcctccaactctgactctatgttaaagagttgattcagacggaggattgcttccgcaggttttgatgcttccgaattatggatgtcttttgggagagcatccacgaaagcccggcgcagatgcgtatagcaaagacatctttttactcctgaaactgcattgtatccggagtaagcgtctgtatggatataaccttcatattccctcagaaacgcttccggatatttcccgcttcgtcccggctggtactcgaagtagcggatgggatttacggcatctctgatgctgcagtaaacccacatataggaatcggacgtatttttccgtcccggttctttcagcacctgtacatgtgtttcatcgatatgaaggtatctctgtttcagaagttccagcttcagacggtggacgatgtgtacaagccagtcccgatagacaaccagaagccagtttgacatagtcgctctgcttaaacgtaatcccaaagcctcccattctttttcctgtctgtacagcgggatgcttaattcaaacttctggtggatgagccaggtgatggtagatgcagatgccagagaatgcaggacgggaggatatggcaccggagccttctccatataaggagttccgtttttccggcatgacctgcattcatacgtttcccggtaatggtcaatcaccttgagttttgcagggataaactgtacttccgtgcggacgaattcttcccctactttcaccatcgtactcccgcagttatcgcatatctgttccctttcatctatggtatggagtactttgctgtgagggagattttttaccagttcttcccgctgaccggtgtacttccttttacgtaggtgcttctctatctcaacaagctccggttcgtgtgcatcaggatccgcacaggtttcgatttcattaaaaagagacatctgcccctcgatttcgagagtagatgtcttctcggattttgttccataaagtttacgggtcaggaaatcaacctgctctttcaggagccggacctgctgttccagttctttgatatgatttttatactcctgttccgtagctgacataacatgaaaaccctttcgcttcgataggattattataccatagaatcgtcagatttcccagcatttctaaggattttcagtattttcagacttatgcgggagccatttctgaaccgcctttggctgctccgggttcaaaccttccagaagccagcgcagctgctgatcagaaatctgttttgcttcttcgccggtccgcggccattggagacgcccgttttcgtaccgtttgtataaaaggcagaaaccgtctccctcgtaatggactgctttgatccggtcagccctctttccacagaacaggaataaggaattgctgtaaggatccagtttgaagttgtactggatgatatccagcaagccattgagctgcttcctcatatcggtgtagccgcatcggatatagattttctccacatgggaaagatctcctaacatgactgcacggctttcagaatgttttccagcatctgggcagatgtgccttcataaagttccactgttatggatccgatatgaagtatggctgcaggagtggaacgggaaatgtttctgtccggaagtgaaagctccgcaaactcagccggggattccgttaaagcagttgaatgttggtctgtacacatgtggatgccgtttttcttgcggggcagttcttccagggcaagctttcgaattttggaaagccagtaataataacttttcaaagagatatcgtgttgttcacaccagatctgatttgtcagtccggaggccctgcattgccgtattacatccagccagtattgaagtttcacctgtttgtctggagtcaaagaagaaagatccataagcctgctccttagattagatttagagttttcagagtcaactcccaaaactctaatcaatagtttacatgcaacagccagaaatttcgatacaccctcttattggacgcttactttttatgaagcatttttttacctctgctttaaacaaaggactttcctaatatataaaaaaagagcttcaggatctcggtgttaccaaaatcccaagctctaataaaatccagaatagaatagaaaatcttgaatctgaacaggttgctactgtccgagaaaaacaggaattgcagaaaaaacagaagacactagatatcatccagcagaatttcacagcactgctcaatgctcctcaaatatcaaacaacgatatcaatcgtaccgttgcaccaccacttcaacattaatattagaaacgttttaaaccatataacacaagaaaactgattccaccgcaatggatcagttttctttaaataatggctagttcatttttctctttttatagaatcctataatcaaaccaagactaacaatcgctattaaaaaccatgcaactatatttgttgtatctccggtttttaccgtatttattattttctgaatagtatttggcttgtcaggttttgaaggtgccggatcctttggcttatctggattgttcgatggtgtttctggtgaaacccattcagcttttggctctatcgttacattatattctacattcccattaatttcagatggaatattaacaaggaatggcgcagattcaaatttatctgtaccactttccacatttccaatctgtgcgatcagataaattccttcatccaattctccaaaactcgtgcatcctgaactatctgtttcttgtattaagccggaaatatcatttcccttcgcaaatgcatacaattgttttgcttgtttttctcttgcttctgcactggtatcttgcaatgatatccctgaatctttaaaaccattttccaagaccagctcatcatttttcatatattgaattggaattatcgagaactttgctccggaaagagtcacttctttatccgaactatttctccccttgtaaataatttgaatgcttcctgttctgcttcctgcttcagcatggattgttgaaatatctataaaactaccgacaagaaaaagcataacgaataaaataatgtgaatacttcttatcttctttctcaccttactttcctcctttttctatctcgtatactataaattatagctatcatcagccctataaaaattactataattgttacaatcagcactttagcagtaaaagacaactctggttttatatttgtatcaggctcttgctttgttgcctcttcataaggtattctctctccacgaactaaaagtctatgtgtgttgattgcaaatggtgtacaagtaacaagtgttgcataatccttacctggttcaatggacaagctatctgtctcttgtggcaaaaccgttaatatctgatcaatctgatatgccagtgtttcatctaagactttaatgtaaaaaatatcccctacttccagtttatccatattggtaaatagtgtttttgtcggaagacctctatgtccagtcagaactgtatgtgtactttctccaccaaccggaagagatgtaccccagaaatgtccgacacctgcctgtaacacagcttcacttgttccatgatagattggaagttctacattaatcttaggaatgcgaatgtatcccatcattccagaaccatctacgtttaacaggctctcatagcgagcatctatttccacatcttcctgcgaaaatggatcaatcaaatcaatatttcccagcatttccttattgtatgctctcgcatcttccagcatttgctctttttctgccttacttaactttacgctttcctcatcataataggatacaactttggaaccattcttttcattcaaataactactaaacgttggatataacaatacggagaatgcaaccaaaagcacaatcagacgaataatatcttttattgttaccttcttttttttcttcttactcttcatttcattctccctgttgttatacttggaattgcggttaccttccgtggaagataaccgccaattccttaaatattatcttatatctctggtaaaattattatgcttcttttcttttgtcacggatgaagcttactgctacaccgaatacaagaagagctgcgattacagcaaatgcaattgctccacgtccaccagtagatggaagaagggaacctgtgctgttttcaacatcaataatcttgtcagtttctggtgcatcatttttctgaacagtccattctgcatcgccagtttttgtaattgtaactttgattggatctgtcaatttgttgaatccttctggagcctgtgtctctactaaccagtaatcgcccgctgcaagaccgttaaggtggaggttatatccatttcctacctctgttgctactgattcaaatacagtatttttcgaatcagcgtctacgacataacttccgttgcttccagaaactgtgatagcatttgttttacctttagcatcctgtgcagttctatataagctaaattttgcgcctgctaacagtccactcgtattcttgttaatctttttgatatctaatggatatgtcggtgtctttgcttcacttggtgttgtagttgttgtatcacctggcttgtttccgcactctaactgagccttgttcttttctgttacaactgcgtttttatttacttttgcataatatgtaactgtgaattcttttcctttatttgtctgatttgcttttacccatgcagacagatcaagactcatctttttgttgtttttagaatcaagtgttgcttctattggtgctgtactagcatctgttgcatctttaaatgctactgctactttaacttttgtagcacctgtttcaagagctgctccatttgcatcgtttacaaaatcaagacctgccgataattcatcatggattttatatacatattcagcatatcctgttgtatccggaataacacctgttactgtatatgttactaccttgccaatttcagctgtttctttatctgctgtttttgtaatacttggcgcttctgtttttaagtttactgtagttgttgtctcatcaactgtaactaaagaagactgaatctcttttccacctgttacatatacaagatagtaaccagctgctaaatcattaaatgtataagatgttacatctccaagtttttcagattttgctgtagcttctaatttgggactcgtagttaatgccttcgttgtaaaagcgttcgcaaaatcctgtacttctttagtatcactgttaccaatatttcttacagcatttgcaatgtcctcatctgtagaagatgctgtaattgctttattatttaatgcagctaccaatacatctttatacccagttgctgcattcactgtatatgcatagttctttgattctgttataccagactctgtcacatcaaacaatttatacagataaattgtctgatctttaagtgtctgtgctggaacaccctctcctgttttcacattaactgtaagtgtgtgtgttcctgctgctccttctgcggcaaatgctgtgacagacatagccatcatcataatcgctaccagcattaatgccatgatttttttcattctcttcataactattgtctccttttcttgagaatttttcttttatagttttctgcttttttattttccttgcattttttatatctcattacgaaatatatcaggaaaagcagaacagctatcaggtaaatcaaatagcttccgtatcctccggtatccggaagacctgggaaatgtctattagttattgtgaaggtaaatccatctggcgatttatctatcgttgttgtataaccatccacctttgcttctgtgatggaatacgtgtaataataaatttcatctccatctgtcttgtatgccgggagttcctttatcacctcctgccatttagatttatcgatagaaccttctattttgtaactctcgtaacctggtactggttctgtcgtttcatttcctgccttatctttccaagtacgtgatattgttaccgtaatactgtttggtcttgaatgatcaaaattgtttaaatctttccaaactttattgatcgtcagcttgatgttctcatcacatggatcctgtgactcggatggttccggtgtatcactatctcccgtgttcaatgttgttttagtatctgccatcaatactgcttttgctggtgattcataggcattaagatctgctttcactgaatcactcttgcttgccagaacagcattctttaaagtctcaaaggtctttaccggattcatgtgtcctattgtataaatatcccatccgcttgcatcatccttttcatgactgctgttcaagatactgttattcttttcaatttgatctaatgattgatccagttttctataaatacgataattgttcttttcgccttccaccttttcctggctattgaagtcatataccgtatccagttcactttttccactaaatggtccaacaagatcttttgttccccgaaccacatcacagtaatacatgttgttgttcttcaaaagtccttcatcgttgaatccaacaaagccaccacttcgtccgtctttagcatcaccatcattgttatttccggctccaccggcatagacatcatatccttgactgacaccgtagacattactatctgtgatttttgttcgattcgccttgatcagactcacactgatattggatttggcatcattatcattcaaaagtccattttcatcgcatggaagtttgatggatgaatctccaatcgtaataattgcaaggtctgtctgttgattgttatccgttgacttttttgaaagtcctacagaaatatccagtccaagcagatttacatgaagcagtttgccatcatacagcgcatccactttgatgattccaagattaatcttcagaagatcggaatcctggattttatccagatatagtgcttttacaagttgattaacaactgagaatattacattcactgctcctgaatccaacttcaaatctgcaagataagcgaaacttgttcgtcctgcaaatccgccggctgttccacctgacgctacctgtttcagtccaattttctggtttgtcttgtcacctgctgtacaattcgacattcttgcaagatttgcatatccgataaatcctccggcaatctgctcatctccatttgtactctgcacagtgtaaccatcatcagttcctgtaactgcacagtcatcaatgtgagaaccaaaaatgtccataactccaagagctccacccagtaactgtcctgtattgtctccaataacgtctatcttgtctgccttaactactccgctctttccagaatagccgacaaatcctccgacactatttaaacctcttacattacttaattctgttactttactgtttttcacagaaccatttagcaatgagccgccaaaacctccggctgttccactataggtaacctgattgttctgtccggattttatcgctatgtttgcgctgacacttaagccagcatccttacttccacttacagttccgtaatatacataacttctaaacgcatccagcacatcggttcttccaagctctaataatttatcaagaagcgaggtctcatttcctgcactgatattggcaactccggccacgtcagcaacaccaaagcatcctccggcatattcacctgcgactacggaacggatattctgtacagaaactcctgcctctttcgtacccttctcaccgagtacagttccttccagatttccggcaaatcctccggctgcttttgcataagaagtgttattacttctacttgcgtaagcaccatttacgatgattccccagtcatcccaggattccacatccgcataacggatagttgcgactgtggcatttaatacttttatcaaatctgccggtgtacttaacagtttattcagaagctgactgagtaatccttctcctgcagtaggatccactgttgctacacttcctggtctggagcttccgacaaatcctccgacataacttcttccgtcaactcgtctcagctttgcgaccttgcagcgtgcatcattttcgccccagatctgtcctccgatcagttttcctacataacctccggcataaccacaggcgtccttatcctcaacaccatttgactcaacactaaggccactttgatatccttctactgaagatcccttgattaccggaacaaatacatccagtactttcagcatctgtcccagatgaaggtcaagtcccagaatatttacaccacctagatctgctgctccgccgtttatcatttctcctgcaaaaccgccggcgcatcgaagccctttaattgtcttcgcctgataagcctgtccatttgtaatagttccggtctgcattgatccgacatagccaccggctgctccgccatttgccagttttgtctcatctcggtaattgactcttcctgctacaacattgtatccgtaagcatactttccgatgattgcatccagttcagcctgattacttactgttccatgctccgcaagatcacttccgtaaccacccttttttccgacaaactccacccatttattccaggtttcataatccatcaaggcaagtggtccgtaaactgccgtattttcttctgttggataaacaacgctaagtgctcccaggatgttatctacctttaccaatccccataataaggacaggtttccggtacttgccgtatcggctgactccataaatcctgtgaaaccacctgcgatttcttttccgtatactgatcggatccggactgctttgcagacacttgttggtctagtataagctttccctttccaattctttgtattgtttccccagatatgaccgccttcattatgccctgcataacctccggccatacctcgttgtacttgtgttgttgaatccgcatccgcacgaactgcaccaccacaaggaacacaagtcgtagagctgtttctgattgtcggcacaaagtcctccgccagtgatgccaatgtatctgacacatcaacaagaccacctaagatacccgtatcgccaagtacatttgccacatttcccggttccagatctcccacgtaaccaccggctgtaatctgaccgatgatataggaaaagttatttgcgttggaatcctgaatgtgtccaccggaaatctttccggcaaaaccacctgcatcaccaagtatgtcatttgccgatgcatcagatgctttatttttccaggtcgcttttactgcaaaacctccaacatttcctgtaacatcagaatgttctattgtagaaacaacaacattcaatgcatccagcacatgattgatttctatcgagttgccaagtacacccaaaccttttccaacggaagctgcagaaccgatatccatatatccgatatatccacctgcatatctggcaccagttactgcatatgtgctttcattttcatcatagtatgttggtgcttcatctgcttccagatccttcggttcctttacagtagtgtgcttcagattcgtaacatcacagtagcttacctgtacaccgcttccgtaaccgataaatcctccggcacttccggaatgactgtcctctgacttcgtcttgttggcagtaacagtaaatccgttgtctgacttgactccggcatactgcacatatggaatgtaggcattgatcagattaagcagatctccaacatttatattcagacctttgattcctccgagaatgctgattccacctccagcatctgccaatgctccggagtaaacatttccaccaaagcctccggcataagactgcccgtttacatgatccagattatatacagaataatagttaccttctcctgcaccctggttgttaaccgttccactctggaagtttccggcaaaaccgcctgctgtatctgcagtaactccgcctttatcaacataagtaaccgtgcactctgtataagaaggaagcaagtacttgacagcacctaacaacttatttgcatttaacaaagctttgacatccgcttcaccagctacatctgcaagacctccagtctgtgaagaacctacaaatcctccggcaaaaccgtctttatcatttgcagttacttcttttaattttttcacatctgacttaatgatttcacagctgttactctttccgatgaaaccaccagctgtataatccactacttcgccgttggaatttgtacctgttgcttgtacagtcatgcctcctgtgatgccatttacatgagcttcgttgattttaactctgacaccttctgccacagaaagcagattttcaactttcagcaagttgttcagtcctaacagattcaaagtcagcccgtttccacctgccagatctcccggacctgcacaaccggcaaaaccacctactctgttttttgctgtaacagattttacctgatttaatgttacagtatccacatctccaccaacagcctcgccaagcgctccgccggcataattttcttttgcttcaactgtatatccatcatttactcctgtcacagttacatgatgcacagtaaatccaaggaagtttccgattccaagcgtattatttaaaagtcctgtgacatttgctgttgttacacttccggcaatacctccggcacgattttcacttgccgtaactgtttttaatcctgtgagcacattatctctttgggctacactgctcgcatcccttccgccatgtttccagtacggaagtttatttaaatattcgggactggattctgcaatatagacaccatcaccaccaccaagaataccaccggaatagctcttaccagcctcaactgaaactgatgaacaatccatgttacatcccaggattgctgatggtgcaattcctacaagtgacaagagcatacctgctttttccggattactcgacaaaagacctgtcaacaagtctttcactgttgttaaaaggcttgcatccttgacttctttatttccaaggtttgtaatccatccaactgttgaaataccactcacaccaccggcataacttccgcttgctttaactgcaatgcttccgctcactccgcaattgactgcatagctgtttgtctgtgctcctacaataccaccttgataattttcaccagatactgagacattacatcctgtcagattgcaatttaacaagatactctgtggctgcattactcgaataagttcaacacctacatcacttaacaaacctcggatttctgcatctctgctgattcctgcaaatcctccgccgtattcttttgccgttacagaataactactgtttttcacggagcagtcaaagattcttgttcctacctgctgtcctacaaaaccacctgcataatctttatccgcagctccgatagttcctgccagattctctacatgacagtatttgatatttacatttttgtatccagtagggattaaactaccaaccggcaatgcattgtccagaagaattgtgatcaaatctccaagcccaagtcccggaattgcatttaacaatgatgataatgcattcaccgttactccaagagcttttgacaatccgtcatactctgttacaccttctgtataaccgacaaacccaccagtacgatcattaatattcgaaacactgacttttcctgtcacatcacagttttcaatggaaacatcacccactagccttccggcgaatgcacctgctgcataaatcgtcggatcctttgctcttgcatttaaaagtgctgataatgtatcttgcaaattcagttttacgcttccaaatgataaaactcctactaataaatcaactacaccacctacaagccatccaagtcccgatgtaagtccacttattatggtctgtgtatttttatgtttattcgtgttattttgtacatttacattttgtaattccaggtttgatacggaaaccgttccggcgctgacaccaatgttgtttacattcacctcattcgtaattgttccaaaaaatccaattcctatatacttagaaccatccatttcttctgtctggttcacattcacattagaaattacaggttttccagttgccaaaatagaatttccatctgtaagtgtcgcctgtccatctgctaactttgcacctttgatgtcccccgacaccataagcggtgtccacagatcatcttctttatttgagttcacaccatccttggataagtcaatatctcgaaaaatgatgtaatttgcattggatgaatattttaaaccaccatattcttgctttaacttcatcagactcgctgtttcattgtcaggtaacccttggtcgttaacgccacataaactaccagttcctactgtaagaccacccaataatgtccctaacagtccacctactcccttcaacagacccgtaacaatatcatcgcttgtcaaatcgacatctgccagcttatacttaccattatctttataatatagatacgagttatcacctttcactgtatctggcttttgttggaatccagaaagatgggtagttgccccttctgcagcaacagcatcaagtccaagatccgcatcgcctggatagtatggtgtgtagaaaggctttccgccaagtaatccgcttactaacccctgacggtaataaacatacagtctcggagttacgctcttattgcttccaatcgcccgcaactgtgactcatttccgatcagaatatatttcttcccggaaacttctacatataattgtcccggttttgttcttccatctgcatgttcaccatctagccactgaactccattcgctgatttttctgtcaattgatctgcaaccagttctggcttatccgaattaaacttctgcgataacacataattatgagacttactataagtcagatactcctgatcttctccatccggatagatcacctgtcccataccaaactgtggtgcatcataatctaatgtcataacaggttctgtttcagattcttcctgtgcaagtaccattaactgatatggattatatatgtagattgtatccgtttccttatcatacagcgttggtgtttcgttttcttctagtttcgtacctgtgatagttccggtaaaggaatccggtactaaccacatctgttccgagttcatctggatgtcattcatcaaaatgtactgagcatctgcaccgtatttcagctctgtgccttcactctttactacttctccagaaccaatctgtccttccttatcgcctgtgtaaatataagcatctgaaccaatctgttttaattgttcataattataaatgcatattttactatccttataataagcatctatgttatctgttgattccgatttaacatttccaccgaacgattccgattcgtcatttttcgagttttcacttgtttcctccgatatcttagattcggattccgtggtgccatttatttcatctgaaactgtggactcggttaatacttcaccattactcttattggcatcatcagaaagtgtcacttgactagtgttggtacccgatggatttacgtctgccgcatccgcaatattcacttgagaaaataagatagccatacatagtattactgcgataattctgttctctatccttctttttttcttcatatctggacctctaatcggaataaaaattcctaccatttactcaatattgcattctaatatctagaatgattttttagcataaaataactaattttattataatatccgttaaaatttctttcattttcatcaaatacctactgagctttttccttactcttctctgtttgattctactttctgcacccactctttttgcatagccgcagcaaaaaaacattgaagcaatttcatggaaaacgctccacattcagcatttacaatcatccttaccgcctcggcatgtttcagttttcgtttatatggtcgctcactgaccaaagcatcataggcatccaccaaaccgaccacctgagcacaaagcggaatctgatctccctttaaaccgtccggatatccagagccatcaaatctctcatggtgatgtcggcagatttcatagctgtacttattcaatttctctgttgtcataccattcggaaatctcaatgtcatctctgcaccggtaattggatgctgcttcacgacttccatctcgtctatcgttaatttcccatttttattcaatatttctatcggtacccggattttaccaatatcatggattggtgccaggtgtgatacattttcaatctcttcttcggtaattccatattccggataatttttctgtagttgacgataaacctgctccgtataaaaactaatatcatcctgatgttccgtttccaccagattattatgattcaataccgcaacaagcaaagaaaccatatcccaatactgtttcgtgatattcttttctttcttccgcaattcctgttccatattaacaatcgtatctggaatgaccttcgcattatggaatgtgagaatggcaatattctccgtctcatctacatatctttttgcttccatccaaatataagactctgcttcattatcacatattctacggtaggacatatcatcttccatacagccgtctactaagtgttccgtaagcttttcgcttgtcaaaaatcgtcttaacttctggcgatcctgttcatatacatattgttctgtgtacttccttataaactcatcataggtagctgaatcacttactttatcatagacttcatgtacgtgggaataaatacattcatatgtttgatcctttaaattcaattttataactacataaaaacgtccaaaatattcatctttgcccggttgaataatatctgatattttcacattttccagcctgttattataagtgttctgcagatccagtaacaccttatgtaccttgcagcaatctgaataatttctggaacagtatccgtccttctccagacatctgctaattgccattgttgactctgtacagttaataacgtccataagagaaatttcttccggtcgtttttccagcatatagcctccattcgatccctctgccgctttaacaatttctttttcttttaattgctttgttattttaggaatgtaacttgccggaatatttaattcacgagatagttctgctgtagttattaccttattttctgatgctagataacatacgattctaatggcataatccgttgtatttgtaagctgcataatgtcaccctctctatccgtccccaataatgatttttatcctgaacatttttcttgtttctttcattgtaaaaaggaagaatcatactttcaggttcttcacttcacaagcacaattcttcctttttgccttaatgatattttctttttacttttctgaaaaataccttgcttccaatgccaatcagtaaaaccacaatcagcatcataatccagctattattctgaatatttcttccggttacgggcggtgccacggttgatgtatttgtaaattggatatcttccgttcctgttgctgccattgtaaatgatgctgcttctccaacggttttcgatccaccatttatcgagtatgacacctcgaagtttgttcccggtgctgtctccgtaacggtatatgtccatcctgtcggtaagcaactgatatctacagattcatcttttttcaatgtaaaggctgcctgattatttgtgaaagtcagtttttctgctgttccatttcctttttcaataacagctgaaagatatcttctcccagtgtcgtttcctgtctgggaagctgtttctcattattctgttctttctcaacctgtttctttttcatgtttcattcctgcttcatatcaacttagataatcaaggtattcttttatggactgattaaagtatagcacttgttttttgcaaaaataatacagagaataggaagatattttcacgttttgctacaaaaagtttgtagttatcggtttttcgcaaaaaaagaaaccataccgtagagatatagtttctctttaaattacagtgtttctgccattttgaataaaacgattccatttctaacagccagcatctcagcagaattcttgaaatcaatgccagaaatatctcttattattttcaatcgccctgaaagagtacgataatttacatagagtttttcagctgctttattcgcactcttatcacagtccagatacgcctgcagcgtttcaatcagttctccatcatgttctttatcatgtgtactttctccaccaactggaagagatgtaccccaaaaatgtccgacatctgcctgtaacacagcttcacttgttccatgatcaagtgctgtcaggattgcttgctgtgcacatctattcggtctgaatccgtagctatggtcatggaactgttcctcatagattggtgttaagacctgtgcaatggcttgttgtatgaatctgtctgttactgttggtactcccaggtttctgacaccaccgtctggctttggtatctccactcttcgtactggttgaggtttatattttcttgtcctcaactgttccttgataatttcgccgtcctttacaagatgttctttaagttctgtgtacttcattccgtccactccctcggcacctttatttcgtacgacttgcagatatgctctgttgagattatcgctggatagtatctgcttcattagactacttgtgtccatgcgttctttcctttccgtctcgcttgatttgaccacctttttcccgattgattacggcagatgttgtcatttctgcaatacgagacatactcaaacttattgattgttcgccccttcgctccatctccattacagagacttcttcgctactatgggctcggctgacttctcacagttcgttgttactaggctaatgaaacctctgtgagacctacacgcttaaggtgcacgctctttcctctcatatatccgccacatttactcggttcctacaaacggcaactttacggctttgtcttatttagcagacttaccaagcggaacctagcctcatatgtgatttctgtccgtcggaccaagagtttgcttacagcttccttcagattctaccttacgatagacacccttgctgttcagctatacacttccttgtcgcctaggcgtgttcgggactttcatccgttagagcgcgcccatggcgcgcaaactaaaatatcgccagccatagcatggctgacgatacaaaaatttattatttttattgtcctcttgacggggagcataccattattatagtggtttatttttttattccaatgcaacaaacatgtaaaatgtctgatgtatttttgcaagttttgttccatagcagtgtttatcttattttccgtcttcttctgaaaaacagaatcatgataatacttatggcaaatagtaaccatacatgcctgcttgtttccagacgaacccctgtttccggtattaattgtgtgttttcgtttgtgatttttaactcaatcacgtctcctcgtgcagcctcaatccgctgtttcatgacagctgtatttccattcgatgttgcctgcactggatttgaatacttatcattctcttcttttttagaaatcgaaacagcgtattttgatgtatcaacagtttctgttattatgatatccgaagatatatctacattttttaatgtaactttatctccatgtttcaaagaagttctaattgtcttgctacgcagcttttgaccatcttcccaatagagaatttccatatcaaatggcttcttgcggtttccaagtggaccagtgacttcctttgtaatctcaaccgtcaccccgcctttttgcggatgattgacgatatgtctgtccgaaacagctctccaggtatttgtcatcggtgatttctcatataggaataaaatatcggattctacatcgaccatatataaattaaagttatcctgatactgtgttttggttttatctgctttgtcctttttgtttggagtaacagattctaccatccagtatcgtccgttctcaaagtcctccggtaattgaagcattccattttcatctgtttctaaggaacgatacgtcgtacacgtttttccatcctttttcagaacgatatcgtccttgctctgtgtattgtcataatctactgtatatcctgtatcatccgcatattctttcgtaacatcatcatacggtactttgtagaacagaaaacctgcaccagcaagtcggtttcttggaagatcatccgtctttaagaaacttcgttcagcaagattgaaatgcagattctgcacttccagttccatcttggaaacatccttgaactcattctcatccttcgggaatatttgttgtccatttgaatcgaaatactgaatctctggataaataacttcataatataggaaaccatccccgtagtccgaagaataatgtgtctttcctatctcgatttcttccaccttatattccaccggatttctgtcctggaatagtggaacattgtcgactgtgtgttcccatccgttctcttcattcagcaagaattcctgtcctgtagaaattccattctgatacaatctgattttcacctgtttttccgtcagtgcatcatttggattttcccatgtctttttgatatgcagagtgcctgttttagcaaaatttcggatattaaggctggtatctcctcgctgaagcagaacagattttccgtctatcttaccatcaactggtgccttaacagcctcctgattttcgttagcctccctatccaccagttttgcatcagtgattttgaatgctccattggcaatctcaactgtgatctgtatatctcctgtgtctacatatcccgtcggtaagtttgtctctcgcaacaaatacgtctcagttgctgttctgttctgtttgttttcatcttgtaacggaatgtgaagttgtgcgattccgtatttatcagttgttaccgtttcctcctcaacaccgttcttactgacagcaaaattgattttctccattccccgtccggtagactcatcaaatttgttcagtgtgagtattccctctttctgataacggttctccaattcaatagtaagagtctcaccaccgcgtccaattccacgtcctgtgaattgaattccactttctggatatgcttcccatgaatttacattatctccttgttcatgagaattgtgaacattgtaccaacctgaaaatttcacattcgaatcttttggcttatagttgtactcttttaatgtgtatttccagaatgagtccgccttaacgatccacgtacagcttgtatgtgtatcatctgtccatgtacctacaacttctattggagcatcctccgcttgcggagcttctgcatccggtttctggctatcttctgaaggaagcacaagtttcatatgctcatgaaatgcaggtggctgaggttttccatctaaaagcttttcatccatatctacctggatataataatctttcttgactttctctattgcttccggcattccgacaaaatctttctttactgtcaggtaaccattttttgctacaatacgtccgtcaatatgccacccatcggacatttcacttttgaaagaataccaataaatggtgaagaattcggtatctaatttcgatggcggaatctccctgtctccgatacgaatcatacgtccgctttcacgaattgtctggaatacctcttcatcggaaggaattctatctatcttgtagatatagtctccatttccaatatatccctcatctggtttagttccctgcaaaagttcttgcactctcttatttccatccgcatactgttcccacgtagatggattcttatttccaagaactggaacatcatgcaatatacttgccttcacattacagtttgccacggcaaccgcacttgtataatcgtctacattcgtggttggtaatgctaccgaaccatcttccggcatcgctgacttacagatataaaactgtacctgttttcgattttggttactcaccttacgccacgctgcatagagggtgattggctgtcttgcattattatttataagatcagaaatagaatcccctgcaccgcattcctgccactttccgtctttgtttctgtaatcccaatgatcgaattcatactgttccaactctttgctgtcattatcttcatgatcataaaccagaggatatggtgacttaacgttatgttttccagcttctatttcattctcataatcatctgtatgtcttgtcttattctcaacctgaggggtcaacttagcttccttaggaagtttcttcatataacgagttgtattatagataaccctgactgccccagactccagcggtttgtctgcgatcacctcataagatgagttaacattcggaatttcaaattttaccttatcatctccggacggttccggaagaacctcattttcgtccctgtcattagatgtacaactccagacaatctccttgccataatactcaccttctaaacttgccctctttggtacttccacagtatatgcttccccatggcctacatactgtctcttaatcgcctctcttttggtcaggttcagtggatccaacacttcaatcagatgaaaacttccctctacactgaaatgtcttcctgccagcccaacctgagaagaaagtcctgtcaaacgatcaaaataattttcgattctgtctggattcagtgggtttggctgtgagaaataatagacagatacatctttcccgtttttcaggacaggaatataccatgtaccatcgttgtccttataagggtgctgtacaaacacacggctgtctgtcgcataaccaaacagaatcttctctttctgatctgcgccgggctccagcttgctcggagtgaaaccaaactcactgtaaattttagaaatcgtatcatctggtttagctcgcaaataataacgactggctcggccactgtttgctttgattatgtaatgctgctcagcattgaggttctttatcagcttataatgtccatcgataaatacataaaaactgatatttgcttcttttgttgctgccggtttttctgtattatcaggaacaatcacatatggacgtactgcatcatctggcttaatagtaaagctcatggtatgctctgcttcatttttactccatgtaactgctgaaagagtaccatcttcctctctgcattcccagtttatatcctgcgtttgttcttctacacgcggctttgtactaactgttcttgtaagtgttgactttcttgcaacaaaatcaattgccggaagatcacgcaaagctgtttggctgtaaacctgtccatcgtcatcctgtactgtcacactgtaaaaaccgttatatctatcatcgtcgtattctagtaaggtctttgcactcattatggcaatatcctgtccgtctggcaggtaatacacatccatcggctctccggactttcctatataaatacattcatgaccttctatcgtgtatttccctgcattatggattgtatcgtaatctctcttggaataataaaaacgctcttttgctccattttgaatagaaccatcgtaatggaatttttcaaaatgcttttttaactcatcattagaaatataataataaactgttcccggctttgttgtagtatcttttataacaggaatttcttcgtttagaacattatatctctcattatttacaaaagtatagaatttaatgttcaaggttgctggtgcaaaagtgttgcatgcaaccgtatatggttgctctatcttcccaatagaaaaggttagtttatcgccctgtttcaccggagaaattgttttattttcatcctcactggcacaaagccaatcgctttccttcgtatctcctggatcaacggaaattgtgaccgcagaatctttcttatagtaactcacagttcgatttccatccggattgatcactgtaaccgaatagaaactgttcttattctgcttaatctggtctgaatcattatccggaattttttcgccatcagatgctccttttggcatataataaacgtctgttggtacagttgcttcctgcttgtccaggttataagatacatactgctgtcctttataagttaccactgtcgcctgtgctaatgtcttctcaccacggactgtatatggaaaataatgtccggattgtgtttcctctgcattcaagccgaactctctataaatctcagcaagatcactgacagataaatagcatctgccctgacggttccatttatacacctttttcagagaatcagccggcagctttcgaacctcattgtccacatatatataaaactgaatatcaaaggctgtctggtccgctctctggatcacataagactgtgtgatttttccaattgcgaatctcgtctggttccccgattcccgtataccatctatcaccttatcgtctgttcccatacaggtccattcgatctggtctgtctggtctggcaatttgggattaaagtcagccacagcttcttccactacagttcctgttaatgcataacggatccgatcctgcccttcgccctttacctctacggaataaaacgaattgtccttttttacagaatcttttaaatttaatgcaacgccttttccatttggaaggtagtaaacatctaccgcttccccttgtttattctggccataattgtaagaaacataggtctttccggattttgtgtctgtataaacttctccgtattctatcctgctttttccccggtatgcagatacaaacttttttatcgcatccggattctgactctcgctgtttttcacaaatccaaattcttcatatatccggagcaggtcctcaatggaaacaccatgataggtagttcttccgtctttccatgttgcaatgccagtaatgtcattatgctgaagctttaccttgtttccgtcgataatgacatagaaatcaatatcaaagccttcggaaatctcctgaagtttcggtgattcctcttgtgcaatctgctcctcgaaggctttttcttcttctgaaatctctccctgggatggagtaatttcttcctccggaatctcttctaatggcggggtgatttcctctccaggagtctcttctaatggcggggtgatttcctctccaggagtctcttctgatggcgaagtattttcttctttcgacgtctcttccgacaatgatgtactttcctccggaataaaatcttctgtgcgcatttcaccctcttgagtactattcatatttggaatattctcttcttccactgaaactgccaaaactgtcgttcctgcgctattcatgcacaaaaccaataaaagtgtccaggctatccatcttagccatctctttttcctcttcacacaaattcctcctaaaaacatattttacttttctcaactatctgccttttttatccattccttctgcattgccgctgctataaagcactgcaatagtttttttgaaaatacaccacattcaccgttggcaatcattcttatggcttcttcatgctttaattttcttttataggggcgtacactgaccaatgcatcataagcatccacaaggcctactatctgagcacaaagtggtatttcatcaccttttagtccatccgggtaaccagatccatcatatctttcatggtgatatctgcatatttcatagctatacttattaagtttttctgtcgtagttccttgtggaaaccgcaatgtcatctctgcccctgtaagaggatgctgctttacaatttccatctcatcagctgttaatttaccgtttttgttcaatatctctatcggcacacggatttttccaatatcatgaattggagccagatgagagacattttctatttcttcctctgtaatcccatactccggatagtttttctgtagttgaagatacacttgttttgtataaaaacagatatcatcctgatgttctgtttctataagattattgtgattcaacactgcagccagaagcgaaaccattttccaatactgttttgtctcatcctgtgctttttgtcttaattcccgttccatatttacaattgtgttagggataacttttgcattatggaatgtaataacagcagttttctcattttcatccacaaatctttttacttccatccaaacataagtctctgagtttttctcgcttcttctttgataaacgatatcttcttctgaacagccctttttcaaatgctctgtcaacgaatcgcttttcaaaaattcctgcagtttttcacaatctttttcacatacatatttttcacaatatactttcagaaaatcatcatatgttcctgcagtttttacatcatcataaatccccctgttatgagaatagatacattcataactgttttccgctaaattaactttcagaatgatataaaatcgcccaaaatattcatctttccccggtctgataatatcagagattttcacattttctaatcggttattgtaaatgttctgtaagtccaataagacttgatgtactttacagcaatccgtatagtttctggagcaaaatccatccttttcaagacagcgactgattgccattgttgattccatacatgatatgacatcaaataacgaaatcttttctggatttttggcaatggcatatcctccactggtaccttcagaagctgaaataatcttctctttttttaactgctttgtgatttttggaatatagctctccggaatctttaattcagaagctaattttgccgttgtaaccctgcgcttttttattgccaaataacagacaatcctgattgcataatccgttgtattagtaagctgcataggtgctcacctctctctcttttctttgttccgtacataaactcattgattgaaaaaggaagaatcagaaaaaattagaagtcaggaacatgctattttcaaatatgttttccaattcttatgcctcatttttcgcatcttccttcctgttcttctgcttctccatgagtaatccgcaaaggcagataactgagccaaagaataagaacaaatagcctgcaaccggactatcatcacctgtctttaccggcgaaccattatgaataatatcctttgatctttgggaagatggaaccgggttttgatttttaccagtttgaccggtatacgagtttttgaatgaaaccttcgatactttatctccattttcatttttgaccactgttaccgccatcagttcattattggaatcaaagaatccttcaatcgttacatcataggtttttgaatcatatgtataattttctttattctctgttgcctggtacagcttgtaatgatattctcctacctgtccgacattcataatcagctctgtagaagaattaccactcatattccaggtaaatgttcttctattgcttccctccggcattggattttgtatctgatctgctattaaaacataagagcctgttttgtcagcatctgcagaattgtttacttcaaatatctgttccactggtattttcactgttgtgtttctgtcagctgccagtactggtctttgaacacccagaaagaatatcatggacaggaatataaccatggctatttttgtcaaacgtgttgttctcatacttctccctctccttctttcttcttgtttcttttcttttctatctgtcttgctatcagaatcagtacaaggacaatcaggataaaccatacaataactggcacttttcctactgcatttttcagttcatcaattcctgtacctacgtttttggctttttctttttccggatatatctgatctgttaagcgtcccaccaggatatttcttccatttgtcatatccgatgtacaggtggtcagcaaaaccagatgatcatcttccgttatattcatatctcttttatataaaacattgttctcgatttcctgcagatactcctgtttcgcttctggtgtgtccagacacacattgaaaatcgtctcattataagcatctacctgtaacaatgcataaatttcgattccatgatttttaccatcaaagaacagatttccatatggatgttcgttgaaatactgttccttcgtaaactcaccaatatctccaaacatcatgtgtttttccatatggtgaccatatataatattgtcaaaatccgaaaagtccggtttatttgcacaatgtaaaaaaatcgctccgctcagggaatagtttccttccgcatctgtattcatataagtctcatcattatctgtctgcaccagcgggtaattgatgttggtatcattgattcttatccatccaatcacatctggattgattttctgcaattcttcaaaagattttgtattcttttctgtcggaatatatgcttcatagttctttgcatctgctgtctggtatacctggtgggagtcccacagcatataacctgagagaaacatggctgcaagaatcagcgataaggctgtgaagtttacaatatggtctaatcctctgataattcctttcagcactttcttcatccgaagcatatgtacaagttcctttcaccatttctgtttcttttatatttatcaaaactggttcatctgaccaatttgctcgcaaaattagcaaaaagggatgcggcggagcaacgccgcacacatcccctttcttggttgctatattttattatttctgtaatcttctgcgtttgaatcctacaaaagcaatcagtgctacaccgcaaagtgcaatcatcagaacgtatggaagagtgttcatgatgataccagttacaggtacatcgttgtatgtattggttacatcaacggtattctgtttctgacctaacttctggttagttactgctgtgagttctgtattgtatgatgtttcagcaacagaagtcagtttagcaccattgatgatgatttctgcactacctttgtagtttttagctgcagactcttttacagtaattgttgttcctactggaacaccagtgaatttcatgtttttatttgctttcaaatggaatgtgtatgttccgccctcagcaagtgtaacatcacctccattagctttgattccgccaagtgtgcttgcatttgttccagccgggaatgcaaatgttgctgtgaaagtgaactcatcgtcaggagttgttgttgtaccatttgcattaacaactgctttagataccttcaaagagccattctcattatatgtcggatcaggatctgtaggatttgtacctgtaccagcttcctgtacataagtgttagtaaagatgaaagtattagtatcggtatttccaatatctactttaccagtttctgtctgacctgcatcatctttcactttatttacaacgatattagaaatttctgtaccagttgcaccatctgtaacatatacatccattgtatactcagcctgtgacatgatcattttttcatgatcactgtttgctactattggatctgctgtctgtgtctcttttacagtatactcatactttcctgcttctgaatatgtcggaaatgtaatctgacttctcttagaagttgttcctgtttgatcagctgtaaacgaaattgttggtattttaacgtcagctgttgtacctattaaaccatcacctgttttctgtgttgctgtaaagctaaatgtttcagcctttccgacctctgtgttgtaggtcttagtaatccatgcctccgttgtcttgccctcatctgccgcaaatgttggcattgccattcccatcgtcatggcaccagcagcaacaactgcgagcacttttttgaacattttgttcatgctcataatgcttcctcccttgtaaataatattgtttgtttctatttgattaacggaggaggggattagagtcctctggtccgaataaccgcaatcgcttttcctttgacatcttttacattgatacagccatagattctgctgtctgacgcctccggtctgttatcacccagtacaaatatctgaccttctccaacggtgattgggaagtcaactccattttgaaactgtgtggtgtcaaaataaatatcctgtgaaatctgcgtagcaccgttaatcatcaaaccgtcttttgttatatctacggtatcacctgcgactgctacgaccctgcctgtggttgttctgccatctttcttaaatactgcaatatcaccggacacaaaacgcttgtccagtcgataatacatgaccagatcaccatcttttattgctggtttcatagatacgtcattgattctcgccatcccgtacataaatgtaaaaacaaggatgactgccaaaatgataagaacaatcttcaataacagctgaaagatatcttctcccagtgtcgtttcctgtctgggaagctgtttctcattattctgttcgttctcaacctgtttctttttcatgtttcattcctgcttcatatcaacttagataatcaaggtatccttttatgtactggttaaagtatagcacttgttttttgcaaaaataatacagagaataggaatatattttcacgttttgctacaaaaaatttgtagttatcggttttcgcaaaaaaaaaagaaaccataccatagagatatagtttctctttgaattacagtgtttctgccattttgaataaaacgattccatttctaacagccagcatctcagcagaattcttgaaatcaatgccggaaatatcttttatttttttcaatcgccctgaaagagtacgataatttacatagagtttttcagctgctttattcgcactcttatcacagtccagatacgcctgcaacgtttcaatcagttctccatcatgttctttatcataccaatataatttcacaagtgactctggcacatattccatcagttcatcacgattttcgattttttcaaaaatctggaaaaaaccgagcttagaaaaatcggctaccgatatattcttatcaccatagagatatctgagcatatccatatagtctatgattttctttgaatccttaaaagattttttcaaatctccatatccattaacaatacttccaatgccaatctgaaaatccgttgttttatttctgtgaaaaatctgcttctgtactgtctgatataatttttccatttcttcccggaaccctgcttgtgtttccccaggcttaatttcatgaatacacacaatctgattcagattccggtaaatatgttcatccggaagtaatctctgaatctcgccttctatcactccgatttcttctaattcttcttttgtataataatcttcgctattgcttgaaatcgtatgaaaacttaccacacaatattgagctgtatctttcaattttagcattcttgcagctttactcaattcatcgcccgttaataaaccattaagcaagctatattcaatatctcgttgatattttttttctatctcattttgagcatatgtttccataaaactatactgtaaagtaataacagcattttccaatgccatatagtccagtattgttaatggcatattcacttccgtgactaccaaataaatttctgttcggcctaacacatgtatttttgtaatatattgcgtatgctcttttctctgttttttgtattcaaatctggtaacaatatccggtttatatttctcaacatttttctcaaatacaaaatcagacagatcctgcgttgtggacgcacagcaagttaagttactataatataacgctaccggattgccaatcatggaagacaatagaaacaaaatatttttagttggatcttcaaaatcctctccatccaataacatgttagaaatattgtcgtgtgtcaatttgaaataaatcaaccgtgcgatattttcatcatagatctgcagaataacatattttataacaccccaataatactcatcttccgaaatttctatcactggaatattacgttccgaacaaaactttaataaaatatcataataattgactttctgtaccatgtccggatgctgctttataataaatccactgacctgtttcttctccagttcattcaaatgtttccgaaactctctgtccgtttctccgaaatacactttcatatttgtaagaagaagctctcctccagtcagatatctttccatatcttctatttcgataattcgtatacctttaatttcctgattcagattttctttacatgtcactaatctcatatcaggaaattgtttcgattctaataattgttttaccgtataagccattcagcacctcgtcaaattcgtcttttgttgtctactttggttgtaccagcatctgatgttgtgttttcaaaagtggcataagtatacagtgtaattatacccccccccgaaattttctgtcaatttcttcatgcgtataaaatgcatattttatatagattcaaataaaaaagacagctcgcatctttgtcgaactgtccattacttcttcaggctgcggataaaagtcataaaaatttctctttccttctcatccaagccatcccaaatctcaagtatttctttttgctcttttgtcagatccaatctgctttcatcatctgaaaaaaattgtgcgattgtatcttcattaccttttccttgctgataactgatccaactttcatctgtcaatttcatttcattctgcatctttaactgactgatgatgccgccgtttccggtaccaatatctagcttacattaaatgatatctttccagattggttggaatacaaacgtctccatacaactgctgaaacatatattacgcgaatccagtctgattggaatacacattacaaggatactgatatcatctagattccgcttatcaaattagacaaattaaccttagattgctgggctcataagctaattcaggataacaacctgactaaaaacgcttactacaacattacagtgattatgcggcaatgcttgaattatgccgtcgataagggctatatttcttctaatccatttagttctgtaacgattgattcacaacggatgcttcgacgtgataccgcagaagttgtatcgcatacaaaaactgctgctggcgatcgatttgttccactaacttctgaagcccagaaattaattgataccgcgagacagtatcaaaaagagcatcactatcctgataatggttatatcttttccatcaatgataaaccactgacagaacgttgtatctcaacactatacacgaaatattgtaaaaagttgggaataattcagaagagctctcacaaagctcgtaaaacatttgtgtctaacttgttatcaaacggagtcaacatcaacactgtaagacaggcagcaggacatgcggataagagaaccacttaaaattacttgcagtaacatatcaaaaagacgtgaaacccttgtaaatgatatgctccccatatggtagacaatggaaatatccaaagatctatcatatgaggagcatatttttatgtctaggaaacagtatagtaaggagttgaaacttgagctcgtaaagaaacaccttgaggatggaatctcttattggaaattaggtaaagagtatggaattgaggctagtatcatccgcaggtggggtcataaatacgaaacatttggagaagacggtctagaaaagcaaaatgctgatttatgtaattactctgcagaatttaagaagaagattattcttgaatatcttggaggcaatataacgagtcaggatttagctgcaaaatacaaaattcatgcaccaagtactgtttgtacatggattaagcagtataataaccatgaagatttaacaaattccagaaaagaaggtgtatatctcatggctaaaaacggtgctagaaaaaatacaacccttgaagaaagaataaacattgtcgaagaatgcataaacacgggatgtaattatgcttctacagcgaataaatatggttgctcctacggacaagtttatgcatgggttagaaaatataaagataaaggaatcgaaggattatatgatcgacgaggtaagaacaaagcgatttctcaattatcagatattgagaagttgaaagctgaaaaccgactactaaaagctcaaacacagcagcaacaaatggagattgatttcttaaaaaaactcgacgaaatagagaggaggtgaacctgaccaagacacgcaatacaacaaaataccttgcaatcaaggaattatctgatgaaaataagacatactccatatcggcgttatgcgagtttgctggaatagctagatcagcctattataaatggctaggtcatgtaaatagtgataatgataatcttaatgaacgcatagccgataccattacaaagattcatgatgaacatctagatacgggttatagacgtataagggatactctagcacatgattataaaatagctgttaatgacaaacgtgttttaaggatttgccgcaagaagaaaatccagtcatatataaagcatcggtataattgttgtactaaacctgcatctgatccagcttatgttgccgaaaatatccttaatagagaatttaaatcggacatgataaatcagaaatgggtaacagatatatcagaattcaaatatggtgttggagaagacaataaaaaaggtaaactatatttaagcgtaatacttgatttatgcgataggaggcctgtcgcttttgtatatagcaccagaaatgataaccctcttgtttttgatacatttgacaaagctgtggcagcgaatccaggagctacaccactacttcatagtgatcgaggctatcagtatacgtcgaaagcatttaggcggcgaattttagctgctggaatgacacaaagtatgtctcgcgtggcaagatgtatcgataatggtcctatggaaggattctggggactaatgaaacgagaaatgtattatggcaaaaagtataaaacaaaagaagaattaatgcttgccatagagaaatacatagattattacacaaacaaaagagttcaacgaaatcttggggtgcttacaccactggaattccatgaacaaaaactagaaagcgttgcataaacaacccggtacataaactgtaccggggaagaaaaaattttcgttatttaatttgtctacttgacgggtagcacaccaaaatcaaggctttccagcgcacaaaaaaatcaccgtccccacagctccaatgtctgtaaaaacagtgatcgtcagtgcgcgatcaggggttcgaaccttgtgtgtttacactcagaaacgcctggaaatggaggtttttgcacagcgtctaggcaagtgtaacacagggtgtaacacctgatatgaaatcattaaattattacaaacatactacatacttagccctatattgctagaaatattttctcattggaattgctgaacgataaatctgtactttatgaattttattctgccataataattctctgattcccaattcaaatacactttctttttctttgacataaggattcaacgtaattccctttaagctatcccttttaaatttataatccacataaggtattaaaatatttccacgtttaaattggcctttttttagaattccatcttgtccagtaatttcttccaataataattcttctggtattttcaatataaccctatactcattttcacacgaaaaagaatcattcttgaaaaaacatctcatattattaatcgcctctttgaatgcccattgaatatgactctggtatttttcaatggtatcttcttgtaaatatacttcatataaattatctagaagagctttaatacacttctgtttatccattctttgatataaaaccagtcctcggcaaatagtaatatcattttccaaatgactactattatttacttccgagatatcgctgccctcaaacaaattccatgcaaaatcaaaaataagattaacaccacttccagatgttgcataataattccacatagtaagtgaatctttgttcgttgaaaaagaacaagtatatgttctatagactttttccgcataattttgcgtatttttttcttttcctatatatggttgtctataagattctaattcttttataagactgtcattaagaatcatatctataaactctgatgcgtattcttcatgctgtgcaacatatttcactaagggaataatttcaataaattctgtagaatcatttaaaaaacgcacgtcactaaatctcaaactttcgttttctaaaatatttttgagtacatctacagaacaataatgacaaattcttgatgctttatttccaatgccatctactccatatatttgatcaattgttaaatctttataaggaacattcaaaaaatgagatcgcgaaattgctatacattttgctaacatatcactttgcatatattattctcctcgattttatttcattaagtttcatttttcatattttagtaatccattcactttatttgcttttgctcgtctcttttagccgtctgtcatctatcctttttggaatactattccccacaaatattacaaataatgaattcctcctctttgcataattctttcttttacttcttctgcagaatcaaatccttctgctgccaaactttctgttgcctcatttaacgcatcttggacgccttctctcatttcgtcaattctctgcattgcaaactttttacccaccccgatagctaccgcttcatcctcaaaagattcttttgtaatttttcgtatatcataaatcccaccaattcctaaagacatattttctgtgctactctcataaatcattgtgctgaccatgtcatatgccggcgcaagacgaatgtcattcaaattctctgcataaagcaacgatacattttttatatgattatctgtatttccaattagataattaaagatacaaatatcccacaattttttctgatcttctaatggatttgaagagcattttctaatcacttcaaacattttctttagataatgatcaccttttttttcatatttcattgaagatgaaattcccattgcctgcgcaaaatcttcctgatgcaacctaaatgggatctgaagatcttttaacatataattttcttttttaaattttctatcataccgttctgttgcaaataaaatattttctccctgcatcttctggctatttataataaaactatttggtacttttatccctaaattacttgccgtcaaaagacacagttgctcatttacaacaattttttccaaacgtacatgactttgtttcacaatatgtgtactcggcatagatcctaaaggaagataccattgagaattagccttatcataatacaaacccacttttcccgatgctccagttaaagacaaatgcgattttgtcacaatctctgcactttccgacgctccttcttttgccagtatctcaacctcacgttcagttagttttcgataatccggtactattttcccactattttcatcaagaatctgaattgcaccaagacactcattgccaagtccagccaaaattgaaagataatcattcacgtctttttgcatccaatctgcaacacattttcttgtgaacccttccggcaaaagaccttcaaaaaaatatcttgtccttttttcatcaaaggctttctcttctaaaggtaagctaatagaaatcggttttccattcttttctatgtaactatcatcataagaaaaacaagcatctactgaagaatccccaacaatcttacctacatattcctgttttccatttttctcaatataaacagataatattctactcatctgatcccctcttttctatttttatatccattcctaacagttgaattaactgtaaagcttttccaatctctgccgtcttcttccctctttctaagtcagaaataaaactaatactgaatccagtaaattctgccaaatcactctgcgtataacctaattcttttcttcttgcccttatagttgctcctaatgttatcgaatctataattttcatattgtctccataaaattagccgttcggctttattttgttttcaatttgattttttaagccgttcggctttattcctgtgatttaaatataaaataagccgttcggctttgtcaacaataaaataatcttcccacgtacgaaaaagcacctacaaggtgctttttaatgtgatgtcaaagtccttcctttcggtaagcgtttagaaagttgttcgcaaattttaatatcttgaaatatatacatcacacccctcccaagctaactggctcatgaatttctatcccctcttccaacgcagcttcaagccacgccttttttgcatcctgtgcattttctactgcactttctattgtttcgccacaagtaatacagcctggcaaatctagataaaaaactacaaatcctccctcttctttgtcttctacaatttccatacggtaggacattgccatgtaatcgttcaaggttttcatttatcttctcctcgcgttactaaaacatatctccaaacatttctccctctatatcacttatctgttcaattgggataactgtcttatcttccataacaactgtatgttcatatccatcaatcttttttacacaaccagagcaggaaatatatgctcccccggcttttttattatccggtacaaatatctattcatttatactgagtttaagttcgtgttttatcgtcacttttgctgaatttctttttcgttcaccttttttgtacaataactttttttcttttcatctttattgaatttcttttgattttaaaacaatataggtacatttcttttgatttcgcgacatctaagtagaagtatttttgcacataaagtaaatttctttatggcagctaagtatattgatattacatggttttaagcagtatttcattaacactatgtaactgatctaacataaggtaatacgaggcaatacaaattcacatttaggtctatgacagcatctataacagcaggatactttgtatattttcggatattatgccttttctttgtataattattcacaccattcaacctaagtatactaatgatgcttagtgtcaaattgaaattccgtataacttattacggaatttgcattttggaatgttttggaacgttttctcccatttttccagtgcagaaataacgtataattctgtgaataattttgatgaggtgaatccgtatgggatattgttttatgagcacagaaagatatttattaggaaaattaacagcaaagaatcccatatagtcttgatatcggatgaaggtttttattggatgagtgaattatgggaagatgtccaaaaagcattgtatgagttgcctttgctgaccggaatccatcttcgtatgtaaaaccggcaggaatataaagggaaagtgactatccctaccggttaataatccaaataatatcatctataccactctctccttatgctgtttttctctccataaaccatttatccacttcataaaacaaatggctttctaacattgcttcatcactttctgcaagttccccaatggttcgaatacccagcttctaaagtttcttccgagtctgtcttccaacataaagcagatccgatgcaggaagctgccaaatcatacttttataattctcccggttaaactctgtaatcgcatctggctttttgtaatctgaaccaagtttcgcataaatcttatttcaggaaattccaatacttaccgttacacccagttcgtatttaatccgatggctgatttctcttgcaatcgttattccgcttcctttcagatttctgctgtctgatacatccagccaggcttcatcaatcccatatggctcgatcttgtccgtatactccgaatagatttctcttgccatctgcgaaaatcgtaaatacaagtccatccgtggtggtacaaatatgatttctggacaaatctgttttgcctgccataatgccattccggtctttacaccttttcgcttcgcaatataatttgctgtcagcacaattccatgccgggcttccggatcaccaccaactgcaagaggcattccggcaaattccaggtgatgcagcatttccacacttgcataaaatgaattcatgtcgctatgaaaacaagacagtatctccaacggtgaaatcggtatcttctatcttaatggcaatacctatatcaaagaactacatgacggtccggatggagtttaccttgtttcattaaatgaaaagtatcatccaatccagatttatgaatctgattcttttaaaatctttggaaaagtaatcggaaaatgcaaaggggcagaaatccctggttttcattaaagatcaactgcagccttctagcctgctcttgctgaaaatactaggaggggctcctgatgttgatcctctatgccatttatgttgtatatatctgtatacgataaatatgaaaattgattcactgatgtgataaaattctacctttatattggaaacaggaaacagaaaaatcacttgccggcagataaatttctgccggcaagcgatttttattttttcaattaaaatcctgtcaatctgaaaaacatcaattcatttgctgatccatcgtctcgttcctgtgtcagcataattaacagagagccgtcatctaaaagctgcatatcttccagccatggataactgacaccaaatatgtcctctgtagaaattgcacctacgtgcgttccatcttttgcccaaaattgtatttcgcgcatatttccatctgcagccacaaaaccattttctgtttccgccatgcccgtaatggaaccgagcttgtccggagaactgatatcttctccacctaatttcaaaagctgattaccatcataatcataaacaacaatttttgtgccttcatcttccgcagccatggatccggcaaccataatatgactattcgtgatctgtacgtcatctatcatggaaaacagtcccttgcgttcttcatcgttatttaatccggtcagtatccacggttctgccgtcaggttaccgccttgattcgcaatcttctgagtatcactgttcacccagaaactgattccccattctccggatggatgcatattcagatctccgtctactgttgtctgaagtgcttttttcccatcttttacgccaattacatctccgattcccggtgaaagatataacattccactgctgtccccagacaaatattcaaaatcatcgtctaattccatcgaagaaacgaattcaagtccactttctgaatattcataagtatccagtttattctccagcagatggaatacctgattgccctgttttacaaactgatgatccataatctgcataacgccctgtgcttctttaaatgggatatattccggaacgattgtataagaacctaccatctgctctgccaatacaggttcaagaggctctccctcccatggccatggtgcgtctttatttccttcatcctctaatttcagcacaattccttccagcaattctttgtcagaatcatctatttcctgtccttttactctgatatcataggatgtgccagactgttcataacgatacatatacgttttttctatggaattactttccggcattgctgtatattctgcatttcctattgttacagtgtccattttcccttcagcatatgcctctaaatccactccaaaggcaattaaactctttcgatatgtatatgaatcctccttggtcgcttctatagaaatgacattctcggatccatctgctgtatctccatcaaaaaatctaacgtaagaatattcttcatctttcttcatattctctttatcgtagttccatgccttcggataatacactgtaaataaacttaatttaagactttctctgtctttaaattctgtttcttcctgctctgctttttccgattttttcttctccggattctttttttgtccacatgccgctatcatcatcatgcatatcatgatacacagcacacaccacagtttctttttcatggcgtcttccctcctttcatgatttccacatccttttcagttattcactgtcactttttacacagtggaatgtgtagtagtcatcatcatcactgtagtctactttcaaagtaccatcgtcatttatcatcactgtaagagatggattttctgattcaatcgaacaatatcccagtgcaactgaccatgggaaagtcccaatctcctcccctttataaataactgttacattacggtcacttttgaaatcaagacgcagtgcatcattgatgttgtctactccttccatagaagtctgaggtccgtctcctaaaagttcttccacactttctgcagcccactcacctatgactgcattttcctcctctgtcagatagagtgccggatccattgcatccgttccatcctttgcaaaaatcacctttactcccatctcgagcatattatcaaaagaaataatatcttttccgatgattcccactatttcttctccttcgatgctcaagataaactgatcatcttcgacagaccattttccattccctgtagtgtctccagctgaaaaggaaacttttccgccatttttcacttcaaattcaaaatctcctccgaaaacttcatctatactgacggacattcccatcatctgagcggacaccgctacccatttcccttcatacgggttcttttctcctgtttctccggagcctccacaaccagtcaatactatcatactgatgataagcactagtccaaataacaaattcaacttttttctcataatcttctctcctttcaattacttattatctaggcgtttgcgaaacgccacaagctgcataaatacggcattttttgttactaaaaatgaaataccccatcactggatatggtataatagagttgtccagaaactatatacccacacccaagaatagaaagcgggtttcccagagcaaaatatatcatagcaaacaaaaacagatactagaaatcataccaaaagcatctgtcaccccctagtataataatgatgtagtcaatcaagactacttggttaataagtttctataaatcagataacagaagaaggggttcttccttcatcagatgttatccgtaataatgatcatgtctgacggttcctgatagacaccagataaaacataaggtattatctcttaggataggacaaagaatgttcacctccttgggaagtcactcttgtgactgatacctacaatgaagtcaattagtccattcgacagggttttatgttttagctggttgggagccggaaggccatacccgaataacgcgctaggttgtgtacctgccagattggaaatggattcctatcagaaaggagctattgctcatgtcaaacaaagttatctttaatctcgatgatttattcatctctgttggtattgatgtcggtgctgacttctcctggatgtctatagcacttccaaaccaacaattcgtaggaaaaccttacaaaatcctacatagcagtattgattcccttacaaccgctgtttctaaaataaaagaagcagaagagttgtattctttggaaagtcgcattttcctcgaatccacgggaatttatcattacccactcttctgctatcttcgtgataagggttttaactgctctgttattaatcctatcatcactaagaatagcacaaacatcaacatacgaaaagtacataatgatcgttttgattctaaaaaagctgctttggttggtttgaaacctgatttaaaggtttcacttatgccttcagaccttgctctaaactgccgtaacctatgccgtgaatactacgatttaatggataatcgcggtgctctatgtgaataagcttcagggtgaattacgcatggcgtttccacagtatctcggcatcttttccaaggttacaatcaacacttctcttacactgttggagacttatacatctccctctgcttttcttgaagcagacaagcaagagattattgatatcatcaaatcaacagctcgctttgggcttacatatgctcaaaataagtataatgccataattcaggcggcaactgatgcaaatcagtttggttacatcatagacagcaacatcaagcgtattcgcctttatatcagcttcatacgtaaatatgatgaagaaatcaacaacattcttgaatcgctccatgagcttgttgatgctaatgaagatgccgactttgtcaagcagattcatttgattgaaacattcaaaggtgctggtttcttgtctgctgtatccatcatgggtgagattggtgacttttcagccttttcaaaaccaaaacaacttttcgcttatttcggtcttgatccggcagtaaaacaatccggaaaatttggaaagtactcaaagttcaaatgtctaagcgtggttctgccatagctagacgtgttattcacacgttaaccttacaaagcattagtatctcccgtaatggagaagctaaaaatccagttcttcgtgagtactacctcaagaaatgtgactcaaaaccaaagctcgtagcaatgggagctgtttcacataaggtatgcaatatgatatttgcaatactcagagacaacaagtcttttgaaatcatcactccacaggagcatatcaaacaatacaatgcttccaaatgcgacatggctgcataaaatactgtacatccaacgaatcaatatctttcaaaagaacgatattttcaccaagggggatgtctacccttttttagccagaaaataagagcaattttttcatttaactattgacatttattagctggacttcctacatcataaagataatatacatttaaaaataaaaaaaagagcaactgatgtttacatactcataaacatcaattactctttttatctttttcagaactttttgggactatttatttccttgcgaccaatctgcgaccagttcgcgaccgatttcgcggcaagtcacttcgtctttacaattcatagtgatttctggttcaatggtcagaaaccgcatatttacgcacaaaaaatcaccgtccccacagctccaatgtctgtaaaaacagtgattgtcagtgcgcgatcaggggttcgaaccctggacaccctgattaagagtcaggtgctctaccaactgagctaatcgcgcattcttttgtttttgtgtctcgtgttcctcaacacaaatagtattatatatcagttgttgccggaatgcaaccccttttttcaaattttttcatttttttcaaaattattaatttcatatacaatttagacgatatcaacaacgtttattctttcccttgtctttgtggcaatatcccgtatttaaaattcgatatacctcctcgaaggatctgcaaatgcagacaatccttcgattcagtctctgatggcaataacacaactcacggatcccggctttccaacatttcccccgtctcatcctgttctcctgtgaatcccactcttcctatataatatatgaaacttatttgttactgttcactcccgtgtcaatcactctgctgattgacacggaggatgtgtgttttgacttgaatgcatctcgccccatcgccaaaggcgatttaaaatggcgagatgcgttgctggtcgcacatcgtgtgaacagtaacacttattttctctgtgcaatcagtttattgattggatttcctttttctgaaaacttctgctcgtactctgtcataatatttccttcattcatctcttcctgatgatgcagatcataagtataagcaatcaatgcccatccggcttctttcacctgttccagagaaaagttgaaaagttctgtattatctgtcttaaactctactcttccgctttccacaagcactttttcgtatcttgcgaggaattccgtagatgtcaatctacgcttcgcatgtcttgccttcggccacggatccgagaagttcaggaagatcttatccacctctgccggtgcaaacacattttcaatctctcttgcatccatacagataaaacggatattctccagcatttcaaattcttctgtatcatacttttcaagtgcgcggagcagaacgctggaataacgctcaattcctataaaattaatctccggatgtgcctttgccatatttagaataaattgtccttttcccatcccaatttcaatctgaatcggcttttcgttaccaaacacatggttccattttcctttctgctcttccggtttcttgatcactgtatgatgtgcgtcgatcacaccatctgctcttggtatatttcttaatctcattaattacaatctcctgatattctctgacagatctgtcacattacaaatctgccggtttatttttacacatgcattatcataacatgaattaatccgtctcacaagcaaacagattccagaaaagcttgtatttttctccaaaaggtgtattataaaagatattatgaatttctaacaaaaaggaggctggttatggactctattataaacaaattgacagagattgaatccgccgcatctgcaatcgtgcaacatgcagaagccgaaaaatccgcattagatgaaaaattcgacaaaaagcgaatggatttcgacaaagagcttgaagctgatacgcagcggcagattcagggaattcgtgacaagctggaatcggagacctcacggatcttatccgggcaaagtcaggaaagtcaggatgaactcgacgccctgcagaaggaatacgatgaaaagcattctgattatgctcatgagattctccgacggatcactgaggtgtagcctatgggaaatctactggaatacagtggtattgtaacgaaaacccgggcaatggaagccaaactccttaccccggcacagtttgaggaaattgcttctctacataatgttcccgaggtagttgaatatctgaagaaagaaactgcttacgcagatattttagaagaactggcccccgaacagcttcacagaggaagtattgagaagattctgactcgttcactttaccgcgactacgcaaagctttatcgcttttgtggacagaaacagcgcaagcttatgaagctccgtctgaaatcttatgaaatcgagctgatcaattattgtttaaggattgtgatcaaccattatcagaaaccttttgatcttgattacaagcgtcctttcttcgaccggtattcacagatatcgatcgagaaactgatcacctcacgcaccaccgatgaactgatcgagacattaaaggatacagaatattatgaacctttaaagaaattaaaggattctccttcggtcaccctatatgactacgatctggcattgaatctttattattttactaccctttggaaagcacggaaaaaggtgtttaaaaaggaagataaggaattatatcagcgagactgcggcactcagattgatctgctcaatatgcagtggatctacagagccaagaaatattttaatatgaaacctgctgacatttatcagctgattcttccgatccactatcgtctgtctactgacttgatcaaaggaatggtcgaggcaacgacattggaagaactgcagacactctgcaatcagactccttatgcccgccgctatgaatccactgagcagcttaccatggagcagatgtattcagaatgtctccatcatctgtacaccattgacagaagacggaatccttactccatcgccgctgtcaacacttacctcttcttaaaagaagaagaaatcaaaaagctgactaccgctctggaatgcatccgttacggactgacaccgggcgagacgttagcgtacgttggaggtagaacccaatgattgttaaaatgaaatttatcaacatttccggtccgcgggatgatattgaccgtgtcacagacttgtatctctcacgttatgagatacaactggagtccgcactgtccgagcttaagacagtcgataatcttcgcccgttcgtagagcttaatccgtaccgggatgtacttgcccaggcaactcagttcgtcggttatcttccgaatgtagatgatgttacaccggatgattctttaggtcttgacgacatgtttgaagttgttcgcaaagcctgcgaggattatgaaggtctgcaggcaaagaaagagaaaaagaaagctaagattgaggaacttcgtgcgaaacagcaactgctctctccattccgccccctcgactgtgatcttcacaaggtcctcggatatcgatatattacatatcgtttcggacggatcgcgctggaatcttatcacaagatgaataaatatctgatggatgatttgagtgcaatcttcgttgaaggtgaacgcgatgaaagcttcgtatacggcgcttacttcgtttctccgggagaagcacaaaaggtagatgctgttttccgttctcttcattttgaacgcatcgagctgaaagatgaatttgaaggaactccgtctttcgcttaccagtcactggaacgcgacattgcaaggatcaatctggagatccaggatctagataaagaagccggagagatgctttctgaccgggctccacagctcattgcagcgaaaaaccgtctggaggaactctccaagaactttgacatccgtaagatggctgcccggatgaaagacagccaggatgactcttatatcctctgcggttggatggcagaagatgatgtagaaaagtttttggaagaaatcaaagatgatgataaagtctttgtcgttgtcgaagacgaccatgatgcatacttcggagagccgccgacaaagctggaaaatccgaagctattcaaaccatttgaaatgtacattcagatgtatggtcttccggctcacaatgagatggatccaaccattttcgtagcgatcacatactcctttattttcggagttatgttcggagatgtcggacaggggcttttgcttttaatctgcggagccttgatctatcactttaagaaagctccacttgccggaattatcgcaactgccggtgtattttccacaatcttcggatttatgttcggaagtattttcggatttgaagacatcattgaaccattgtggatacgaccgatcgaccatatgactacgctgccgttcctcggcaaactgaacacagtgtttatcgttgctgtcgcatttggtatgttcctgatcatcgtagcgatgatcctacatattatcaatgccgcaagaagcaaagatatcgaaagtacctggtttgatccaaacggtgtggcaggacttattttctacattgccgttgtagtaaccatcgttctctttatgacaggcaatccgcttccgggtggtattgtcatgggtatcatgtttggtgtcccgctgcttctcattttcctgaaagagcctctgacccgcatgattgagaaacgtgccgacaagatggaaacaggccctggaatgtacatcgtacaaggctttttcgagatgtttgagacattgctcagttatttctcaaacactatttcctttatccgtatcggtgcatttgctgtcagccatgccgctatcatggaagtagtacttcagctggccggcgctgaaagcggaaatccgaactggttcggagtaatcttcggcaacctgttcgtatgcggattcgaaggactgatcgtaggtattcaggtacttcgtctggaatattatgagatgttcagccgtttctacaaaggaagcggacgtgcattcgatccatatactaaaaagaaaacaaagtaactgttggatcataaatttatgacagctataaaatgtatagaaatcaggaggattccactatgagtttagcaacaaaaatcatctttatcgcagcacttgttttaagtatcatcatcccattcggatattatctgatcggtgaaaagaacaaaaaacgctacaaacgtacaatcggtgtcaacgcatttttcttcttcggcgcatttgccattgcatctatcatgatgcttgcaggtccggcaaatgtacaggctgctgaagctgccacatcttccggtgctacaatcgcaacaggaatgggatatcttgcagccgcacttgttacaggtctttcctgtatcggcggtggtatcgctgttgcaagtgcagccagcgcagcacttggagcgatcagcgaggattccagcgttcttggtaaatccttgatcttcgtaggacttgccgaaggtgtttgtctgtacggactgatcatctctttcatgatcttaggaaatctctaatttctgattttcaacagaaaggagccgcctatgaaaatgtatctgatcagtgacaatgtcgacacttacaccggaatgcgtcttgccggtgtagacggagttgtcgtccacgaacgggatgagctgaaacaagctttggaaaaagtgctttccgatccgactgtcggcattgttcttctgactgagaagttcggtcaggaatttcctgacattatcgacactttccgactggagcgaaagatgccgttattaattgaaattcctgaccgccacggaaccggtcgtcagaaagactttatcacctcatatatcactgaggcgatcggactgaaattataaacgcaattatattacgaactaaaggagggattcctcttgactctggaagaaaaaatcgcacacctgcaaaccacatccatggagcaggcccgcttagagggaaatgtcatcattgacacccatcaggctgccctggagaaggttttcgaagatcataaggcagaagccacaagacagtcagaaactcgcatcaaggcggaagctgccaatgcgaagctctcactgaatcaggcgctcgccaagtcccagctggagatcaaacgtcgtcaaagcaaggttcagcaggaattgaaagacaagatcttcgaggaagcagacgcattaatcgatgaatttatgaagacggaagcttatgatgattttcttatcaaatgcatccgcaaagcggtggcttttgccggaaatgatgagcttacgatctatattaacccaactgatgaaaaaaaacgttctgatctggaaggtgctacaagagttcatctgacgatcagcgccgaagatttccggggcggtgtccgtgctgtcatccgttcccgcaacattttgatcgataattccttcagcacacaactgaaagaacagtatgacaaatttgtatttttaggaggtgacggcattgcttaagacagcgaaaatttacggcatcaatggtcccgtcatttatctgaaaggcaacacaggattccgtatgtccgagatggtctatgtcggcgaacagaagttagtcggagaagtcattgcactggataaagatatgacaaccgttcaggtttatgaggaaacaacggggcttcgcccgggcgaagaagttattgccagcggaagccctgtatccgtaacacttgcacccggtatcctgaacaacatttttgatggtatcgaacgtccactggaagatatcgcagaatcctccggcggcgcatttatcacacgcggtgtcagtgtcgattctctggaccgtacaaagaaatggaaaacacacatcactgtaaagcagggagattatctccatgcaggtgatattatcgcagaagttcctgaaacacatgcgatcactcataaatgtatggttcctcctgaagtagagggaactgttcttgtgactgttgcagacggtgaatacacaattgacgaacctctggttcgtctggaacttcctaacggacaggagaaagaactgacaatgactcagcattggccgatccgtactccgcgaccgactcatcaccgtttcccggcatctgttccgcttgttaccggacaacgtatcattgataccatgttcccgatcgcaaagggcggtaccgctgccatcccaggcggattcggaaccggaaagaccatgacacagcatcagatcgccaaatgggccgatgcagatatcatcatctatatcggatgcggtgagcgtggaaatgagatgacacaggttttggaagagttcagtgaactgaccgatcctcgtaccggcaaacctctgatggaccgtactacactgattgccaatacttccaacatgcctgttgccgcccgtgaagccagcatttacaccggacttactctggcagaatattaccgtgatatgggctacgatgtagcgatcatggccgactccacttcccgttgggctgaggctcttcgagaactttccggacgtctggaagagatgcctgccgaggaaggattcccggcttacctcgcatctcgtctgtctgcgttctacgagcgcgccggaatgatgcataacctgaacggaacagacggttctgttacgatcatcggtgctgtttccccacagggtggtgacttctccgagccggttacacagaacaccaaacgattcgtccgctgcttctggggactggataagagccttgcctatgcaagacatttcccggccatccactggctgacaagttacagtgagtatctgaacgacttaagtcactggtatcaggacaatgtatctccgaaattcgttgattaccgcaaccgtctgatggcacttttgaatcaggaaagcagtcttcttgagatcgtaaaactgattggaagtgatgtactcccggatgatcagaaacttgtccttgagattgcccgtgtgattcgtcttggtttcctgcagcaaaatgcattccacccggatgacacctgcgtttctatggaaaaacagttcttgatgatggatacgatcctgtacctttacaagcaggcacgtacccttgtcacaatgggacatccgatgtccgtattaaaatctgagaatattttcgatcgtgtcattgcgatcaaatatgatgttccaaataaccgcccggaaatgtttgcacagtatcacagagatattgacgctttctatcagcacgtacttgagaaaaatgcataaggagggaccactatcatgtcaattgaatatcttggcttaagcagtatcaacggccctctgatcgtgttagagggcgtacaggacgccttttacgatgagatcgtagaatttgtcgtagacggcacagaacgcaaaataggacgtattgtagagatttacgaagacaaggcagtaatccaggtcttcgaaggttctgaaaatatgtccctgaaaaatacacatacgaaactcaccggacacccgatggagattgcactctccccggatatccttggccgtaccttcaacggtatcggacagccgatcgatgacctcgggccgcttgtctccactttaaaaagagatgtgaacggacttccgctcaacccggtccgcagagaatacccaagaaactatattcgcaccggaatttccgcgatcgacggactgacaactctgattcgtggacagaagcttccgattttctccggaaatggacttccgcacgatcagcttgctgcacagattgtaaaacaggcttctcttggaagcgattctgatgaaaaatttgcaatcgtattcgctgctatgggtgtcaaacatgacgttgctgatttcttccgtaacacatttgaagaaagcggtgttgccgatcatgtagcaatgtttttgaatctggcaaatgacccggttgtagaacgtctgatcacaccaaaggttgcactgacagctgcggagtatctggcatttgaacaaaatatgcatatcctcgttatccttaccgatatgacttctttcgcagaagccatgcgtgaggtctcttcctcaaaaggagaaattcctagccgtaaaggattcccgggatatctgtatagtgaactggcaaccatctacgaacgtgccggtattgtacaaggcgtaaacggatctgtaacacagcttccgatcttgactatgccaaacgacgatatcacgcatccaattcctgacctgacgggatatatcaccgagggacaaattgtacttgaccgcccgctccatggacagtcaatctatcctccgatcaatatcctgccatccctttcccgtctgatgaaggacggtatcggagaaggttttacacgtgaagatcatcaagatcttgccaatcagttattctccgcttatgcaaaagttggagatgcaagaaatctggcttctgttatcggtgaagatgaactttcaccactggataagaaatatctggaattcggaatcgactttgaacagcactacatcggacagggtgttaatgaaaaccgtacaatggaagagactttggatctgggatggaaacttttaggaaaactccctagagaagaactcgaccgtgttgacacgaagattcttgataaatactataaacctgctgtagaagactagggaaaggagggagcttcatggatccacgtacatttccaacaaaaggtaatctgatgctggccaagaactctcttgcacttgcccggcagggttatgatctgatggataagaagcgtaacatcctgattcgtgaactgatggatctgatcgaagaagcacgcaccatacaggaagagattgattcgactttcacttatgcttatcaatgcctgcagcgtgctaatatcgaaaacggtatcagtatggtagaacagctcgcctacactgtaccgattgaaaattctatcacgatccagacgcgaagcatcatgggaaccgagattcctcatgtgaaatatataccggatgccggtcagccgacctatgccttcagtaccacaaaggaatcgattgatattgcccgtgaggccttccgcaaggtaaaggaccttacgatcaagctttccatggtagaaaacgctgcttaccgtcttgcaagtaatattaagaagacgcagaaacgagcaaatgcacttcagaatattacaattccaatgtattcgaatctggtctactcgatcaccaatgcactggaagaaaaagagcgtgaagagttcacgcgtctgaaagtgatcaagagaatgaaagagaaaaaagcctccggttaacttccgggggcttttccttactgaagggggactgttatgagtatccctaactattcattattctactgctgcaatgatctgatattctttttcaaaagtctccccgctctctaccttattaattccaggcttctcagagatttctttatcaaatccaatattatcgcatcttcccatccatggttccaggcagacaaacggtgcgtcttttacagaccagattccatagcttgggaatccttcagacttaactcccacatacggagttccgtctttatgacagatccacgcctcttcaatctgcgtattatcaaaaatcagcgcatcgttttcaaacaattcttctgtcagcggatatgtctcttcattcagtttcatctcatgcagttcctccggatcaggagccatttctttcatattgatcaaacaatacttcaattcatcttttccagggaacttcagaatataatctgtctttccttcctcgttctttgcaaaacggaaggccggatgcgctccgattgtgaaataaattgtctcatcagacggattctttacttcccattttacatggagtacgtttttttccagtgtgtaagtaatgaaaagttcaaaatcaaatggataaacttccttcatctcttctgttgatgtcagaagaaaggttgatgtttctttgcctgcatgaatacatttgaactcactgtctcttgcaaatccatgctgtgatgtcggatactgtgtaccgttgatcttcactgtgttcttataggtttttcccacatttggaaataacaccggtgaatgacgtttccaaaattggggttctgcatcccagagaagatctgtacctgttttcttgttatacagttttgtcagctccgcaccatgctctgcaatctctacgctgagcacatcattctccattttaatcatgattttcttcctcctttattcccctttaatttttatcggactgttctacctgtacgcaattatctaccagatagtccagtactttatcacgaaggattgcatctttcagaacatcttctcccacctgctctttgtaggtatccagatctgctcctgccttgtccgcatactcctgcattccttcttcgtattccttatcagacggttccagtttctctttctttgcgattagttttacagcctcttcaagctgcacagcctgttttgcggattcctcaattttttcgttaaatttatcttctgtcatattcagataagttgtaatgaaatcattcagctctactccgtacatctgtgcaatctgtgtatagtagtcatttgcctgtttcacctgctcgtctaccgcaccgtcaggatatttatttacctctatctgatccagtaaagcagtctgtacttcttgtttcaactgtgaattacctgaatcgtcctgctgctcctgaagagaatttttcacctcttccttgtattcatcaaccgtcttgctgctttcactattattcacaacccactcgtctgtaagctccggtgctactttctgataaatcttattcaatacaatgtgaaaattcgccggttttcccgcaagatccgcactcggatatccctccggaaactgtacagtgatatcaaattcttcacctgtattatgtcccacgatctgatcttcaaatccctggtaatctccggatgctccgataaatgaacctgatccaagttccaaatcatatcctgtagctgtgccaccgtcaaatgcagttccatccatcgtgcctgtataatcaatatttacccagtctccactctgtgccgcgcggtctgttacatcctgttctgtcgcagcagcttccagtctggactgtacctcctgctctacagaatcatcggacacctcgtttttggcaacctctgttacttcaagtcctttatatttgttcactgtcacataatcattagacaacttaccacttccgcatcctactaaagatgctgtcatcagaaccgctgtaagaaccgcaatcactctttttttcattttcctgtttctcctcttttataatctcttttttattttttgtcttatccactataaaagtggtgacagtaatctggaaaactgttccttgaaccggatcagtaaattcctctcctcatatatctttcgtgtcacctgcgtactcattgtcatatcattctcaaaagctctttccagcctctgcactgtacgctcactatagattgttgcattcacttcaaaattcaggccaaaacttcggatgtccatattcgctgtacctacacaggcaaccatgccatctactgataatgtctttgcgtgaaggaatccattattatagacataacattttgcgcctgctgcaaccatctccccaatataagaataggttgcccagtaaacaaatggatgatctggtttgcatgggatcataattctgacatctaccccggatctgcttgcaatcttcaacgcatccagaatggacgcatccggtatgaaatacggtgtctgtatatagacatgatttcttgcactgtggatcagatgaagataattgtcatggattgtcttcgtctgtgagtccggtccacttgagataatctgtaccggatcaaatccatgcctgtcatactgcggaatctcaaacaaatgatcttccaaaaacaagttctcatgagctgcataattccaatccaggacaaacctcactgcaagagatgtgaccgctgcaccttcaatacacaaatgtgtatctctccaataaccaaacttttcgtcttttccaatatattccctgcctacattgaaaccaccaacaaagccaacctttccatcaatcacgacaatctttctgtgatttcgataattcacacgcatctgaagctgtcccagaatcgccgggaagaattctgcgacccgaattccttcgcatttcagcctgtcccaatctcttttgtgcatggtacgacatcccatactgtcaaacaaaactctgacttctacaccttcatgtgctttctcgatcaataccttctctatatcctgccacacttcatcgttcctgataatataatactgtacatggatatatttcttcgcacgtttcatttcctcgatcagtgcatgaaacttctctttaccatctgtataaatacggatatcattattatctgtcagaactgcctgtccagcctccagattatacagcacaagatcccggaaccggttaagtgccggactcgtcatcttcagctgcctgtgataaatggtttcctcctgccttcgcacagcgtatttcagctcaccttcaatctcctttgccttgaacatcttattcttgtgataatcctgccctatgatcagatatagaataaatccgacaatcggaataaaataaagcaaaagcagccaggtccatactgcctgcggtgatcttctttcaaagaatacaataatcagagataaaagaatattaatgataacgatattcttcataataaaatgaaaaaccatcaccactgtgttccatattgtctctgccattcaactctccctttctcttaatcaacgtgaaaatattattgctcactataccccgtcacattcttcggacagcgcgttactgttctatctttctgcaaacaataataaaccaccataatacatagtatactctgtttacgtcttaaaagtaaccccaaattgtaaaattgtcccctgtctgcttgcactttgtaataaagaatgttacaatattaaatgcgaattaagcggaaaatagtaaataggagggttttatcgtgagtacacctatgataatcatgctcatcgtcctcgtagttctcatcggggtttgcgtagcactctatttcttcggaaagaaagcgcagaagaagcaggctgaacagcagcagcagatggacgcagttgcgcagaccatcagcatgctcattattgataaaaagaagatgaagctaaaagatgcaggactcccggccgttgttcttgagaatacaccaaagtatttaagacgttctaaagtaccggttgtaaaagcaaaggttggaccaaaggttatgactctgatgtgtgacgcaaaggttttcgaagttcttccggtgaagaaagaagcgaaagtcgttgtaagtggtatctatatcacaggcattaagagtgtccgcggtggtcttgatattcctgagaaaaagaagaaaaaaagatttttctcaaagaaagaaaaataaaaaaattaaaataagttcagtcaaacaattcgactgaacttatttttttaattctttttcttttgttcttttctctcggcctcgtatttcttcaattccctcaacgcctgaccacccatcagatacaggatcactgtattgaagatcgtcattagtccgatcccgacatcacctagatcccatacaaatgtatacgctgcgattcctccgatgaatagcatcacaagcgcaagcactttatatgctgtctgggacgcccagttatcaccgaacagatacgccacattacttcttgcataaaacagaattccaagaaatgtagaaaagctgaacaagaacagcatcactgcgataaagatcacccctgcttctccaagatgatatctcatcgctgtctgaagcagttccattcctgcaagtccctcaatctgatcctgcggaacaagcaacatgatcatagctgtacagctacagatcacaattgtgtcgataaatacgcccaatgcctgaacaagtcctgcctttaccgggagatcacactctgccgcagctgctgcacatggggcagatcctgaaccagcttcatttgagaataatcctctcttcactccgttcatcagaacggctccaaaaccacctgctgccacctgacggactccaaatgcttcctcaaaaatacgtgagaacacacccggtatgctggacaaattcgtaaagatcaaaaatactgtgatcaggaaataacacactgccataatcggaacaacaacatccagaacctttactgttgcattctttcgaagcacgatcactgctgccagaaccaccaaaatcacagttgtataaatcggtgggatagaaaatgcattttcaaacgaagacgtcactgaattactaatcacctggctaataccacaccaacagattaatcctgaaattgcaaacaataccgcgatcactgaatatctctttttctttccttgatgttcttccatgtagtgatggatataatatgccggacctccgcggtatcctccatacaacggatctttttctttatgaagctgtgcaagtgttgcctcaacaaatgctgtggaagaaccgatcagtgccgtaatccacatccagaacactgctccagctccaccggctgaaatagctgcaacaacacctaccagattccccattcccacacgggttgctgttgatacaatcagtgtctgaaaattagacaacccatcctctttcccttttttactattcaacgatcttaccatctccgggaaaagacggattggaagaaatcttgtacggattgtgaaataaatccctgttggaatcaacagaataatcagaagtgatattcccacacttccgccgcctggaagcggtatctgaaacagatcgccccataaaaatgaatatactttctcgatcagtgttattaccatcatcttatcctctcattcttatctttttcatttttccgcctgcttatccaaaaatgcctcggcgttcttgtatcttaactaagcactgaaaactttccactgtccttggaaacaatattcatccgtatcttacagtctgccatcggttcatgatttacgtccagttcataatcaatctggaccgctatcttatcttcttcaaaatcaacctgaaggtgtctcgtattcactccgatcagcatctgtccataaggcgtcttataaaatgtctgattctttttatttttctcaaagatcatatgagagtttgaaagaccgcttttcacgatctctacacattcatctccgttaatcttaattctgttcttgatcactccggaagttccttctacaacttcctcgtagacaatataatgttttccgttcttcaaataatacgttgctggtgttacaacttcgattgcttcgttctcatcttcctctacctccggagtgaccgccacaatctcttcatgcattccggaaatacttaccaatacatcttttgtcataaatgaattctccatagaaaagaatcaggaagatttcattccgtcagtctttccgcaaccaacgtacaagcacgaaataactttcctgattcagaattactaattaatactcttcaatatttactacattcgttgtcggaacatcaaatggcatcactgtattcgcaaacttcctgaacttctcagccgcatcgctgacatagaaggaatactcactatgatgttctgtcgtctcatcattcgccatctcttcctcttccaacagacgtttcagatccatcgctgtctcatatgcaggattcacaatctgaatcttatcccccatatattctctgatcttagatctgagaagcggataatgcgtacagccaaggatcatcgcatcaatatctgtattgcgcatggattcgagataatactcaataatctctcttgtcacaatatgttctttgaatccctcttccactaacggtacgaaaagaggacaggctttctcgatcacttcaatcttaggattcattccctgaatcactttcgtatacattccactctgaaccgttgcttcagtacctaccacaccgacttttccattcgttgtagcttctaccgctgctctcgctcccggaatgactactccaatgatcggaaggtcaaactcatccttcactgcatccaatgcaagcgcactcgccgtattacatgcgatcacaattgctttcacctgtttcgtcctcaggaaacggataatctgttctgaaaaacgaatgatcgtgttttgtgatttactaccgtatggaacacgcgccgtatccccaaaataaacaatgttctcatacggcaattgtcttgatatctctctcgctacagtcagtcctccgactcctgaatcaaacaccccgatcggtgccatctttttattcttcatgtccgtcaaagttctccccttaatctatccttatcagttatttttatcttatcgcagatacacaattcagccatgtaaccttcttacaaaggctgcatggctgaatgttatatttcattaccagtcatctggtaaccattgctattctattataataactcaaagtgatatttgcaatgctatttcacatttttacagagcaagagtcttcgctacatcgtactgatatgccggaattgtcttcttcatagcaagtgcttcttcaatatcaaaatcaataaactgtccgttcttgtatcctacaacacggtttgtctttccctggcaaagaaggtcgactgccatagctcccattgtagaagcatatactctgtccttacatgtcgggcttccaccacgctgcatgtgtccgaggattgttgctcttgtctcaattcctgtagcagcctcgattctctttgccatattgatagaatctccaacaccctctgcattgatgatgatgtagttcttcttaccacgtttcttgttcgcaagaatatcttcgatcagtgctttctcatcatagtccttttcctctggcatgagaatcttctctgctccattggcgataccacaccacagtgcaagatatcctgcatcacgtcccataacctcgatcacactgcatctttcatgagatgtagatgtatcacgaaccttatcgattgcttccattgctgtattaacagctgtatcaaatccgattgtgtagtctgtacatgcgatatcaaggtcgattgttcctggaataccaattgtatttacaccaaggtttgccagtttctgagctcctgcgaaagaaccgtctccaccgattactaccagtccgtcgattccgtacttcttacagatcgcagctgccttctgctgaccttcttctgtacgcattgtcttacaacgagctgtctggagaactgtaccaccacgctcaatgatatcagacacgtcacgtgctgacatatcaatgatttcttctttcagaagtccatgataacctctgcggattccgcgaaccttaagtccttttgcaagtgcacgtcttactaccgcacggattgctgcgttcattcccggagcatctcctccacttgtcagaacaccgattgtacggatgctgtcttcgatttcatcaagatatttttctttgtcgactgttttattttctgccatgttttagtccaccctttctctgaaatgtctgattactgccaaaaccaatcattgtcaattttttatcaactccgccaatattctaccttatttagaatatgttttcaataggtttttccactacttttactctcttctcgccgaaatgattcatcaatctgcttaaaatttgttcatttataccgatactcctatttttcggcagtcttttcaccacacgttcctttgcacaatagattacaacttcatcatttccatcagaatccgccagatagccatagacgatctgctcttggtctaagaacgtttctttgtccgggaactggatccatagctctttctttgtctgctcaaacggaatgattttttcgcagatcagcttgctcggcttatcatcttcttccgaaactcttccgcgaacaaataccttactatctacttccagataatctctgttcttctcataatctcgtgggaacacaacaacctctaccgttcccaaaagatcttctaccgtgataaatgccatcatctgattcgtctttgtgtgctttatggtcttctctgtgatcattccaccaataatttctttcgccccatcatgcacttttgtatgaccggtctcttcatccagctgaaagtccgccgttgtcgcagaaatggatttcttccacttctcctcatacgcctcaagcggatgtccgctgacatagattccaagcacttctttttcaaatgcgagaagtgtttctttggaatattctcccacatcaggcatcctgatctgaaattcttctttctgatcttcgctcaccaagtcaaacaatgtcatctgaccaaccatagagttctttttctcctgggttacatgatctacgatctgtacatagatactcatgaactgctttcttgttccaccaagcgtatccagtgcccctgccttgatcaggttttcaatcgtgcgcttatttaatatgttctttgctgaaagacgggtaatgaaatcttccaggttctggaacaacccaagctcttctctgtcttccacgattgacttgatcaccggtcttccgatgctcttgatcgcagcaagtccataacggatatctccgccatctacggagaaattcgcttctcctttgttaatatccggcggcaggatcttaatattcatctgacgacatgcataaatatactcagataccttagacggattatcaatgactgatgtcataagcgctgccatatattctaccgggaaataatatttcagccacgcagtctgataagaaaccactgcatatgcagccgcatgagacttattgaacgcatattttgcaaaatcgatcatttcatcataaatcttatttgcagtctgttcatcaattccattctttatacatcctggtacgcctgtctcctcatcgccataaataaagatcttacgttctttctccatgactgccgcctttttctttgacatcgcacgacgcagaaggtcgcttcgtccaagtgagtatcctgcaagatctcgtacaatctgcataacctgctcctgatagacaatacatccataagtaggggcaaggatcggctccagttgtgggcaatcatatgtgatagaagaactgtcattctttcctcggatatactgcggaatgaaatccatcgggccaggacgatacagcgaaattccggcaataacatcttccaggttatgcggcttcagttccttcatgaaccctttcattccagcactctcaagctggaacacaccgtctgtcttaccggttccgatataatccagcaccttttgatcattgtaatctatctgattgatattcagttccggctgctttcttcttgcaagcagcactgcattctgtatcacagtcaatgtacgaagacccaggaagtccattttcagaagtccaagttcctcaagtgtcgtcatgataaactgcgttgtgattgttccgtctgctgcccttgaaagcggtacatactcatcaactggcttctgacagatcacaacaccggcggcatgcatagaacaatgtctcggtaatccttccaaacgcttcgccatatcgatcagatttgtcaccgtctcatccgtatcatataactttttcaaatccggattcattttcaaggctttatcaattgtgattccaagctcctgcggaatcattttggaaatagaatccacataagcatatggcagatccattacacgtccaacatcacggatcacacctcgtgctgccagggtaccgaatgtaacgatctgagccacacagtcttttccatattttcttgtaacgtagtcaataacctcctgacgtctctcataacagaagtcaacgtcgatatcgggcatggatacacgttccggattcaggaaacgttcaaacagcagctgatagcggatcgggtcaatcgtagtgatctcaaggcaataggacacgatacttcctgcagcggatccgcgtcccggcccaactgagattccgtgatcttttgcgtatttaataaaatcccacacgatcaggaaatagtctacatagcccatctgatggattgtttccaattcataagacaaacgatctttcaattcttccgaaggatcaccgtaacgcttttccaatccttcatagcaaagcttctgcagatattcccaggaagtataaccatccggtacatcatatttcggaagttttgttacaccaaattcaatctcgacatgacatcggtccgcaatcttctgtgtattttccaacgcctgtttcgcataagggaacagacgcagcatctcttcttctgacttcacataatactgtccgccgtcataccgcatacgattctcatctgaaagcttctttccggtctgaatacaaagtagaatatcatgtggcttcgcatcttctgcatatgtataatgaatatcattcgtagcaaccagctcaattcctgtctcttcagacattttgaatagctgttgattgacaagtccctgctccggtatgccatgatcctgcaactccaggaagaaattcccttcgccgaaaatttcctgatactctaaggctgtcttcttcgcctcttcatataatcccttcgtcaggaatcttgccacctcacctgccaagcaggcacttaaagcaatgatacctttatggtacttgcgcagaagttccttatccactcgcggtttatagtaataaccttccacaaatcccttcgaaacaatcttcgtcagattcgcatatccttcctcattttctgccagaagtacaagatgataatatctgtcatctcctcctgtaatctcgcgatcaaaacgagaattcggagccacatacacttcacatccaaggattggattgattccctgcttcttggcttcccgatagaaatcgatcacaccatacataacaccgtgatctgtaattgccgcactgttcatcccaagttctttgaccctggacacgtattcttttatcttattcgatccatccagcagactaaattctgtatggacatgcaaatgtgcaaaactcatagttcacctcaatgatcaaattttaactaagaaaagggaaggctctgacttgatacacaggtcagaatcccttccctttattttacactctttatggaaattttaaaatgttaaatcttatttatttccaccatccatcataaactggatcagcttatctgtatcttctttctcataagcgataacttccagctccggaatctctccgttagagaagatattagccatagatacatactgggaaagtttagacttcaggttcagtctgtctccctcacctgttactaactctactcttcctttacaggaatctactaccttaaagaatccttcaacatctgcaatattctgaactttcattctaaatacccctttcttttaacaatttaattataactttacttcttaaattcatctgggaatgatattacctatcattttctcattcctaatgttattataacgtatttaaagcatattacaagtaggaagaatcactatttttcttattttcagcatatagaatctcacacttttttctatttgaaacaacacttcctacaagtcatagtcactttctctaactcgtaacggttcgtttgcagattgcttttacaaactataaataccatcctctttgatcacgattttcttctgttttaagagtcttccaactgcacgtttgaacgcagctttactcattcccatctctgctttgatgcgctccggatctgccttatctgtaaatggaagcttgcctccgcaagtctcaatacattccagaatcagttctgcatccttatccatctgctccggaatcttgccacggatactcagatccagttttccatcctctttgactgctgccacacgtgcttcaatctcctgtcccggatacattcttccatacatctctctcttcggaatcaatgcagaatacagattatctactgccacgaaagctcccagatcacgattcatctcataaactgttccggttacaacatcatcctttttataaggagagtctgtctgcagaaggtgatagatcttcattgtcgcacaaagtctctcgctcttatctacataaagacttaccagacagcggtcgcccttctctaccttctctgtctgttccttgaatggaaggaacaggtccttctcaagcccccagtcaaggaaagcacccattctgcctacatctgctactgtcaggacagccagctgtccaagagtgatctttggctcattcgttgttgcgatcatacgatcggaagaatctttatagaggaatacctcgatcggatctcccagttcgattccgtccggaacctgtttctttggaagaagaacacgctcctcgtcacttccaagatatactccaaaatctaccagctttactaccgtaagaacctgttttactcctaatctcatcttttctccattctgccgctggcttacgcggcccattttttaattcgtatttatatatgctttcatataccttaatgtattttctatcccgttgtcaatcaaatctcatcattttcagctttgaaaggtaattttattttacagtttgatgtttttataagatgctcaccatcaacattttatatgaaaatgccctaagttatttttatcattcacgacatataaacaaaatccctcctatcaaggaatttcatatcaagccaacaaattattcaaaactccaagaattttatcaaatgttatatctttcgcataagaaaacttcttttgatatttcacccacatatcattcaaattagcactagaaaaaatctgttcaataattccttttacatctgcaatcttttctaacgaaccacgatgtattgctgtagctttcaatgcttctttaaaaatttctttatcatactcctgcgtagttccaagaatatacacatcatagaaatctctcggtctagttgtgaatacaccacggcttaatattgtttctactttttctgccatgacggtttcgatattatatccccataaagtaattttaacattttcatcaaaaatacctccgaactcatattttacagctgctggagtaataatatctcctgtggaaacatctatagataacggagtaacgattgtatcataacttgcatccaatcttacacaatatccaccgtaaacatcatctttacgaatcggtgctgcacggatttaacttcaaaagaaacatcgtcattcaaatctaccttacaaattgagctgagtgctgctgaaatctgttcttctttcaaaggtagatttcgtaaagtagtgtccaaatccatcgttgaacgagtatctaatcctacaatggctgcaatcaacataccgcccttaacaacaaatttttcactatactctgatacagacattctctccaaaaagcgttcaaacatatagttctgcaaaaccacctgggctgcaatattattgatttttgcataatttttaattcttccctttaggctcattgcttttgaactcatagtaaaacctccatatagcgtttcaattccttatcgactctaaacatagaagcatacaccgctaaacgattcagatctttatctggtgaagcagcataatttttcactgcactaatgactgtttcttcatctatcctatgtcgtgatcgcaatatatcacagatggtacgttctgtatcataacaacgtactacgtttcccattgtattctttttttcaatcacaccaattaaatgaagttctggttttatataataacattgacattcatctatcaacgagttcggaagtgatgtattacttggaattgttactgaatgcataaacggtgtacgctcagataaaccgttcagaaataatgccgtatcgtgtgaaaagacaattttatccgaacgcatcatcaacgtacacatatcatcgtgtacggaatcagaaagaatatatattccttgtctactacgctcaagaagtcctgctttgacatattttgaaagaattgttcttgaaaatccaagttcgattacttgagctgttgttatcatattgttattgctctttattttctctaaaataataggatttatctgcatatcaatcgcctcgattcagcatttatatagaaataatacatcttttccattcaaatgtcaaccaatcataataccgatcagctttgaaaggtaaatttattttacagtttgatattttcttaacatctttttactatgaattgatttacctttctgaattatgtataattacttcaatgtgagagcaatctttctgcctacagcctgtctgaggcagtatttttaagagaggatattagtatgagtgcacaaaatcttactttattgacagacctgtatgagcttactatgatgcagggatattttgaaacacaggaaaatcagactgttgtattcgatgttttcttccgtgacaatccgaacaaaggcggatattccgtcatggcaggactggatcaggtcattgactatattaaaaatctgaatttttcttatgaagatgttgattatttaagagggctcggattgttcagtgaggattttctccattatctgagcggatttcattttagcggagacatttatgcgatcccggagggaagcgtcatcttcccaagagaaccgcttctgaaagtcgtagctccgatcatggaggctcagcttgttgagacagcaattcttacgattctgaatcatcagtgcctgatcgctacgaaagcttcccgtgttgtttatgcggcacaaggagacggtatcatggaattcggacttcgccgcgcccagggaccggatgcgggactgtacggagcaagagctgccgtgatcggtggatgcgtcggaacttccaatgtactcgccggcgaaatgtttgatgtaccgattatgggaacgcatgcacacagttggatcatgactttcaaagatgaatatactgcatttaaagaatatgcaagattgtatcctgatgcatgtacactgcttgtcgatacttatgacacattgaaatccggtgttccgaatgcgatccgtgtttttaccgagatgcgcgatgcaggcatcaaaccgaagagctacggtatccgccttgactccggtgatctcgcttatctttctaaaaaggcgcgtaagatgctggatgacgccggattccaggatgctgtcattgccgcttccaacgacctggatgaatttctgatccacgatctcaagatgcagggcgctgcaatttcttcctggggtgtcggaacgaaccttattacatcaaaagactgcccgtcctttggcggtgtatataaactggctgctattcaaaacgcagaaggcgaattccagccaaagattaaaatttctgaaaacattgaaaagatcactaatccgggaaataaaaccatttatcgtatttacgataaagaaaccggtatgctgcgcgccgatctgatctgctttgctgatgagacatttaatacagaggaagatctgcttctctttgacccgaatgcaacatggaagaaaacacttcttccgggtggaagctatacaatgcgcgaattgcttgtcccaatcttccagcatggagaatgtaagtatgagtccccatctgtaaaggagattgcagaattctgtcgtcaggaaaaagagactctttgggatgagacaaaacgtctcttcaatccacataaggtatatgtggatctttcccaaaaactgtacgatacaaaaaccaagctgctgaatgaagcacatcattaattactgtcaccatatgatgaaatggagttttaattattatgaaataccaagtgattgtacttgatctagacggtacactgaccaattcaaaaaaagaaataacgccccctacaagggacgctctgattgaaattcaacagaatggaaaaaaagtagtcctcgccagtggtcgcccgatcaacggtgtcgcgcctctggcagaggaattatatctaaaaaaatacggcggattcatgctctcctttaacggtgcgagaatcacccgttgttctgacaatgcaattatttataataaggttatcccacaggaagtcatccgtccgatttacgaggcggtaaaagaatatcctggattggaccttatctcttatacggataaagtaatcctctcaggtattaaaagtaatgaatacactgagaaagaagccgccatcaacagcatggagatctgtccggttgaggacttccctgccgcacttgatttcccggtcaataaaatgcttatcccaggtgaaccttccatcctggaagacctgatgccgaagctgcagaaacaataccacgggctgctcaacatctaccgttctgagccattcttcttagagatcatgcctcagaatatcgataaagcacactctctgcagaagcttctgaacagcatcggtctcactgccgattccatgatctgctgcggcgacggcttcaatgatctgtccatgatcgaatatgccggtcttggtgtagcaatggagaatgcccagccggtcgtcaaagaatctgctgactttatcacaaagtcgaatgatgaggacgggattcttcacgttgtaaatctctacatgagagattaggccttttctccggaagctgcgcaagaatcacagccgcaaatacaagggcacatccaaaaagttcccttggagacaaggtttctccaagaatcacccagcctgcaagtactgaaaatacagactcaagacttaacagcagagatgcaactgtcgggtctgtatttttttgtgcaacaatctgcaaagtatatcctactccacaagacatgattcctgcataagcaattggtttccatgcctgcaatatagaataaagttccgggtgctcaaataaaattgtcggtatcatacataagattccacaaacaaaaaactgaatacaggacatcttcactccgtctgcttttggtgaaaaatgatcgatcacaagaatatggaatgaaaaagcaacagaacccagtaaaatataaaaatctccttttgcaatggaaaatcctgacgtcatgcataagaaatacataccaatcacagcaagtactacaccaatccacactttaatccctgctttttttccaacaaccatgcctaagattggaacgatcagaatgtataatgctgtgatgaatcctgcttttcctgctgttgtatactggattccgatctgctgaagagaacttccaagcataagaaaaatgccacaacaaattccaccgatcgcaagcgtttttttatttggttcaacttcttctacttttgatgtattcctctttttctgcttatctaatacataaatcaaggaaatcagcacaattcctccaagaatacttctgacacagttaaatgtaaacggtccaatatagtccattccaacactttgtgcgacaaatgctgcgccccagatcagtgccgtcagcagaagtaatacattatttacggatttctttttcaatacttttacctctttcacaattttagtcattctctagtatacagaaaaatctgccgattggcagatttttttgatttttcttattatttttcttaatagtgcataattaccggatctccaacctggatcaactcatacaatttcccggcatccgaatagctcatattgatacatccatgagaacctctgtaggtatatacatttcctccaaaactgctctgccatgttgcatcatgaaaaccaacaccggaatacgttacacgcatccaatattttacaggagtttcatactctcttgttccatccggtcttaaattaccgcgcagtactttattctgcattcgttccaaaatcgtataaactcctgccggagtacttcttccgcctttcggaagtccggtcactacatctgctgacatcaaaacttctccgtctttgacataccacattttctgattcgtcagatcgacttctgcataagtggagccccaatcctgcgcaccatgcgatgccgcagtctttccttccacataaaccggctctcgacttattgtttctccgctttcaacattcgcgagaagtgtctcatactctgccttttcattaatctcccaaccgtaagttccaccggaaacttcggttgctcttccatccggtgtagtgaattgtctggtctttcctgcagtatcatactgctgtgcaaactgcgtcacccattcctgtataagttccgggtgaaatgtcaccgcataattctcatctgctgtcacccactgtgaaataattgttttatcaaccacaaccggtgtatcaagtcccatctcataagttacactcgcattcaggtatgcattcatcgcatcgcacgcctgctgaacttccaatgactcctttgtatatagcggctgtacataacatcctgcttcatcaagattcaactgctcttgcagtccctctattgcttggactaccgctttcttcaatgcatctgcatcgattgccgtcccttccgtaatgtctcccggaacaaacttttctccgtcaaacaccggcatagaagatatcggctgtacctgttctgttgtcatagctgtcagacttgcaatcttcgcatctaatgctttctcatcataatctgcacttgccgtgatggacaatccttttccctctcccgaccatgctgccggccacagaaaaacggactgctcctttaatagtctatctatcactccattctctttatattcaacagagatctcttttcctgtaatcatatcagaaagtcccgcatgttctgtaatcttcaattcatacttcttaacttctgatttcagataatctgccacatcttcttccttagcatatgaaaaatctttcccgttaacctttgtattcggaagaaaatgactcataaaatacaaagcggttcctatgtaccctaaaaccaagattcctgcaaccattccgaggctgatccatagccattttttcttgttgtcccccatcaaatgacttctcctttgtaattactttatcgcctgtccttctgtagtatttcactactgacaaaccgcttttatagcttacacattttctattatgacagaaacgcaaagatatttccttaattttttcttattttagtaatattttattcctttggatataaattaagagggacactacaataaaatagtatcccccttcactcactataacaaagtacagtctataatttattcacattttgtaaagtacatagaaattccctgtccaccaccaatacacatactgatcattgcatctttcttatctgttctcatcaactcatacattacttttacagtaagcatagctcctgttgctccaatcggatgtccaatggaaattccaccaccatatatatttactttttctggatctaatccaagatcacgacttacagcatatgcctggcttgcaaacgcttcattaatttcaaacatatcaatagacttcaaatcaacacctagtttgtttgcaagtttctcactagagaactttggtgaatatcccatcaattctgcatcaaaccctgcaattgcatatccttcaattttcatctttggtgttacaccaagctcttctgctttctctttagacattacaacaactgctgctgcgccatcgtttaagctggatgaatttgctgctgtaactgtaccgcctttcacaaaacatggacgaagttttgcaagtttttccatactctgtccttctcttggaccttcatcggtatcaaatattgttatatttcccttacgatctttcaattcaactggaagaatctcatctttgaatttaccttctttgattgccttgcatgctctctgatggctgcgtactgcgaacgcatcctgttcttctcttgttacatggtatttctctgctacattttctgctgtcacaccattgtggtttccatccaaaggccatgtcaggatatcaatcactccatcctcgaataccttatgtcccattcttgctccccaacgtgcatcatttacataatatggaagtctagaaatgttctctgtaccacctgcaacaacaacatctgcctgtcctgtctgaatctccataacagcctctgcaatagactgaagtcctgatccacactgacggtttacagaatatgctgttgtctcttttggcattccagcttttaaactgactgctcttgcaatgaagccattctctgcaacttctccaacctgtccaattacaacttcatcaacatctgatggctggattcctgctcttttcactgcttctttaactaccatagctcccatatcgattgctgtgatatcctttaagcttccaccatagcttcctactggaagtcttactccacttacaacaactacttctttcatttttatatcctcctgttgttctgttttttgcggttctctctcgtaagcaagaaccgcctttgatactatatttattgaatctgcaattttatttttagaagttagatccgatcttatttcctttttcatcgtatttgtagaatccctgtcctgtcttctttccaagcattcctgatttgaccattgtctcaagaagtgggcatggacgatatttgctgtcatggaatccgttgtaaagtcctgtcattgttgcaagcattgtgtcgattccaacaaagtctgtcagctcgattggtcccatcgggtggttacatccgagcttcattgcgttgtcaacatcttccggtttgcttccttccattaccatgaaggctgcctcgttctgcattggaacaaggatacgatttaccatgaatccaggaaactctggagcatctactgttgtctttccaatctttcctgcaaattctttcactacatcatatgtctcatcggatgttacaagtccacgaaccagctcaagaagcttcataaccggtgccggatagaagaagtgtgctcccattactttgtccggacggtttgtaacagatgctatctcagagatactcaatcctgatgtgttagatacaatgattgtctctgcatctgcaagctcatctactttcttaaatgtatcttttttaatctcaatcttctcaggtactgcttcaactacaagaaacgcaccctttacatcttcgaagttctggctgtatgtcaggcgtccaaggatttctgctttcttctcttctgtcatagatccttttgttactttacggctgaacaatttttctactgttgcttttgatttttcgattgcagcttcgaatgtatcaatatttactacatcgtaacctgctgtcgcacaagcctgtgcgattccatttcccatcaatcctgctccgataactgctactttgtttttctccatgtttttgtacctcttttatgttaattttaattgttacccgtttgattatttctctttaagctgtaatccgaatggtccgttctgaatgaacagggacgcatccatttcccttagttcctcgctgatgatcggcttaaaatccatcatatctagaatctgtgtatgaaggtcgatacctggtgcaatctcaatcagcttcacaccttctttgcagagctcgaagactgcacgttctgtcacgatcataacctcctgacctttctttcttgccatcggtccgttaaaggaaagctgtgctacatttctcaccatcttgcggatcttgccttcctgaagaatgttcaacttaccatctttgaattcatattttgcaccgcttgcagtaaatgttccaaggaatacgatcttcttcgcattctgtgtaatatcaataaatccaccggctccagtacatcttgttcccatctttgtggagttgacgcttccgtcttctcccagttctccaagccccatatatgtaatgtctacaccagctccgttataataatccatctgctcgtgatggccaatcattgccatcaaattctggccaattccgaagtcaattccgccggcctgaacaccaccataaataccagactctaccgtaataacaacatcatcggataccttttcctcattgcagacctttccgatcatgtcatttggaattcctgttccaaggttgatgactgctcctctatacagttcctgtgctcctcgtcttgcaataaactttctctcgttgaacggtgccggtggaatatctcctgccggtactcttgcaagtccgcagtaggatgggtcatagtaccaagatgaagtctgtctgtgatcttccattggattctcacatacaacaatatcatcaataaatactccaggaaccgttacatcctttggattgatcgttcctgactgtaccacctgttttacttgtgcaataacgcgtccgccatatcttttagctgccagaactgctggaagtacttccagtttcattgcctcttctgttgtcgtaagatttcccatctcatcacataccgttcctcgaatcagaacagtatcaagcgggatctctttataaaacatgtactcttctccgccatattcgagaatatccacaatatctggaagtggctttgtacggtcattcatctttcctccttctactctcggatcaatgaaagtaccaagtccaaccttagacatcttacctggaagtccacatgccatacttcgataaagctgtgcaatctgtccttgcggcagacaatatgcttctacctgactgttggcaatcatctccatccatctcggttgcagaccccaatgggatccaacaattctcttgacaagcccttcgtgcgccaaatgctgaattccatcttttctatcactctgtccacaggaatgaaccaaagtaatatcggcaggatgaccaaccgtttcaaatctcttttcaattgctttcaaaattgattcacttgcactgaccagtgtcattcctatcgtgcataatgtagacccatcctggatcttttctgctgcctcctgtgcagtaataaaatttgcttttaacataatgcctcctcttctattgaaaaagtgttctgatatacttcttatctgtcttaagtcccggtgtcttcggaattgcatccagaaaaagaatccgctccggcaccttgaatcttgccatctcttttaacatttcttctttgatctgttcctctgtaagttgtgcacccttttcaagaactacaacggctgctgcaacctctccgtacttctcattaggaattccgacaaccgctgcatctttaacccccttaaatgcgataagttcatcctctacatcagtacaccaaatcttctctccaccacggttaaccatatctttcttacggtctacgaaaaacacaaatgcatcctcgttctgatatcccatatctcccgtatcgagccagccatcttctgtaaataacggtgattccatcttataatagtattccactacattagctccacggatataaactgttccgacagttcccgtctcaacctcgtgtccatcatcatcaagaattttaagttccagtcctggaacaggtcttccggaagaagatggataaatacttaaagccgtatccgtcggaaacagagttcccgggcttgctgtctctgtcatgccaaatacagtacgaatctctgtggtcggcagccatttatgtaactgctttaacttctccaccggcatataactgcttccgcacaacatcatacgcaaggaaggaagtgccggatactcttctttcagatccatcaaaagtccaaaaactgttggcgaaccatgcatgaatgtgatcttattcttttcaatacattccaaaatacgatgtgcttcatatcttctgtataaataaacagttccaccagaataaacaaacagtcctaacaatgcaatcaaccccgttacatgataaatcggaactggtatgatcgtcttatcttccggtgttatctcacataatcggtgatataccatcgtcgcatgaatgacattgtaattcttcatcacaacacctttactgaccgatgtcgttcccgaggtaaacatcagaatcatctcatcttcaagctttccctgtgaaccgcctctttttcctttcggcagttcaagatgccggaatccatatccttcttcctcgtcaacagaatagacaattggaaattgttcctcatactttttcacccagtctgtaaatctttctgctgccaccaacagatcaatatctgctttttcaatcaatgcctgtatctcgtgctctctatatttacttggaaatggaatcacaacagcaccaatcttgcagattgcatagaacacagtacagaactcaatactattatgaagaagcattcctacatgctgtcctctttgaagccctttttctttcagccactgtgcaaaatcatctaccatcccgatgaacgttccataggtgtaggctctattccagttgtcagaaaatccaatcttatctggaaatttctccgctgtctcctcaagaatctcataataattatttttcatatctgagaatgtacagacctggcgatttccgatcgtccgcatttccatgcctttcgtcacatgaacattccagacctcttgtccctttatcatctcaaactcctttcagcttacgctgatcattttatgaaaccgctcccataaatattcaaaaaaatatttgttctttcgaactacccatagtttattatattttatagcctttttcaatctgaaattgtcacaatttttattttatttcttgttttatttgcacaaataaatagtttatttcactatattagtgaataccgctcccattatttaaatctgtttttattggttttaagaagtatttatgatatactcaagattaagaaaaagacttttgacagcaccaatagaaaaaccaaatgaggtaacatcatgaatgagaaaattgatattaactatattgcaaaaaaagcaaatgtctctcgttctactgtctcaagggttctgacaaaaaaaacaaatgtaaaggaatccacacgtgaaaaagtagagcaggtcatggcagaactgaactatcatccaaactctatggccagaggacttgctactggaaaacagaatatcatcgcgcttgtagtttccgatatccggaatcctttctacgcacagcttgtctggacgattagtacttctcttcgcgaaaaggggtatcttatgacactttataacagtgcagatatgacacgaaaagaccgtgaatctctctggagtcttttagactatggattctccggtctgattatggcagacgcaagaaaagaggatgatttttctcaattcttaaagcaggctgactgcccgattgttctcgtcaacaggacactcggcattgccaacacatacgatacgatcactttggacaatatgcagggcggatatctcgcaacaaagcatcttctagaacttggtcatcggcgaatcgccatgctccgcggaccagaaatttctacaaccagtcagggacgttacgagggatatgtctatgcacttcaggaagccggaattccattagataagactttgatccgtgcgggaaaactgaacatggaatttggacgggagtttgccaaaaaaattattcttcattctgacaatcccccttctgccgtatttgttggaggcgatttcacctgttatggattgatggatgcctgcatccgtgcaggaatacgaattccagaagatttaagcatcgtcagttttgatgatattcctttttctgatacagcaatggttaatctaactacaatctcccatccttatacacagattggtgagcttgttgctaagaagattgtccatagaatcgaacagccagatgctcctgtcgaacaaatcacattgctgccaacccttgtaaaaagaggaagtacagcaccatataaaaaataattttttcttttaaacttttatcaatgaaaaactcaaaagctgccgttttacaaaagattattttataaagcggcagctttttatattaactgtttttttctaattcgatagattcatccgccagcagatgatacaattcatcaatctggtcgtcagaaagcaccctctcattcttttcattttcttctttcagtgtctgaatcagctgcttcctatggattacaggaatttcattttcaggtgttccatcccatgtaatttctgcatgctctgggaatataataacagaacgcaccggaatcttagtagccccgattctctgctctattctctttgcaaaaaatctgctctcatccattggattcttgaacaggtactcatgctgtttgtccgcctgtcccttcttccctttttccgtgtaatattgcttgtaatctccatgtttcttcagaacaacctttccgctctgattcttcacattcaaaacgtagattcccgatgggatgagtatcaggatatatgcctgtggagtcttctcattcttgccctgtgcaatctgatagaaaatcttatgctttccaaactcattattcaaataaaaactttcagacaaacgtattagatttttcctacgaaatgcatactcaaaatagcttgaatagatttctatataaatgcttcttctaaaacgattccactggtaaatcgtcttaatcaaccagtatcctcctgccacaaatgcaagacctattaaaacgtcactccaaactgacatagctacctcctgaatttatcctaatctctttagtcgagttcaggtccgttgtgtttctcgaatgaataacgtccgctagaaccaatcactctcatataagatttaataaaatctttcattgcatcttccacagcaatacataaatccatataatcaatctgcggattttcttttaatgttgcgatagatgcatttgttgcatgacgcatcagatctgtacacacattaatcttgttgattccacatgcgacagcttttctgatattctcttcgccagcaccactacctccatgaagtacaagtggcatatcaagttctgctttaagttccttcagacgttcaaaatcaagttttggaatcattccttttggatatgctccgtgtgctgttccaattgccactgccagacagtcgcagtttgttctctctacgaactcttttgcctgttttacatttgtatacagatccacattactgtcatcggcctgtgctgcctgtcctacatgtccaagctctgcctcacaggaaagtcccattccatgtgcgagacttgcgatctgctgtgttcttcttacattctcttcgaattcatagctggatgaatcgatcattacactagagaatccatactgcattgcagctgtaatatcctcaaaattcgccccatgatctaaattgaacgcaactggtacagatgctctctttgcaagattttcaatcaatggcgccattatatatccatatccatgcgccttcatctggcgaggagaaatattaataataactgcggacttctcttcttctgctgactcgataactgccttcacctgctccatattaacacaattaattgccataactgcgtagttattatgatgcgcatgtaacagcatgtctttcattgatacatacatttttcttcctcctgattttaaaaagtgagatgtcctgagcagacatctcacttacatactaaagcatgtgagagaagctgccaatggcagactctctgcatttatttacttttcaaacaactcttaaatcaacggattctccatttcctcatcctcagcaccttctgcaagaggtctcttaaggatagaatacagaagacctgtgatacatcctcccaacagccacagtccaatgaacagaagtgggttagatgtcatagccactgagaatacaccaccgtgtactgccggagattccagtccaaacatcatacacagaccacctgtaattgcaccaccaacacagatagaggctgtcagtcttaccgggtctttcaactggaatgggattacaccttcctgaacatagcagcaagaaagaattaccaatgataaagcctgctccttctctgttttagtgaatttgttacggctccatggaagtactgtagaaatagcaattccaagaggagatgtcatacctgcacacatcttagcagatgtaggaataaagaatccatcagcattcagtccatttacaaacagagctgctgtcttattaaccggaccaccattgtcaaatgcgatcattgcaccaataactgcaccaagtacgaatcttgaaccagcacttaaagctgtcagccatcctgtaacaattcccatcaaccatgcgatcggaacaccaataacataccacatcaacaacccaacaatcaatgtcgaaagtactggaataaacataatcggcataattccctgtaatgccttcggaactttaatcttcttcatttgaagaacaaaccatcctgcaatcagagctccaacaagaccacctacaaatcctgttttcataagtcctgcaagtacacccattgcatatccaggagcaatacccggcttatccgcaatagcatacgcaataaatgctgccagacaagggactgcaaatgcaaacaagttgttaccaattgtgaaaataacctgagccaatgtctgcatctcggcagctgtgtctccaatgttatatcctcccatcatttttgcaatcgctgtgataacaccaccaccaacgattaccggaatcatgtaggaaatacctgtcatgattgcatctttacaaactgtacctacacttttttgtttttttctttgaagttctgccataattatcctaatgcctccactaactcatcaattactgcatctgcatctttgattggttcatttaccttaaaactcatcgtcggaacatctttaaaacgactggatcctttgatttttacatcactagcaataatgcacgcatcacatcttgcaatatcttctgctgtaatctcgtcttctactccctgtgctccctgcgtctcaaccttgatttcgattccttttttttgagccgcctttttcagatttgctgctgccatataagtgtgggcaattcctacagggcaactacatactgctactaaatacatactcctattcctcctttttacttttaaatatatcgatgatctgatctacgtcagtagcatcctttaatgcctctctgaaatcgtcatccatcaggcctactgccaaactagataacattttcaggtgtacgttatctgctgtgtttggtgccgccagcagaataacataatcaacaggttctccatcaagagatccccattcgatcttttgattcagctttaccagagtaaatgctgcttcttttacacagccccctttacaatgtgggattgcaattccatttcccatgccggtctcaaattcaagttctctgtctttaactccctgtaagtagtcttcatagcttgatacttttccggcatcatacatcattttgcagatttttcggattgcatcttctttatttgttacatctagtccgaaagaaacaagcctttcgtctatcatatctgccatactcatatttttgtagctcctttctgtctatctgaacatttctgaaaatctcctggcctttaatattacttccaccgccttcttgtcttttgtcaactccaatacgtctccaaagattcctttgatgtaatcttttgaattaacatccaaagacagtagaaagatcagctgaactttttcgtcaccccagttaatcggttttttcagtgtcattattccgattccctgtttctttatatggccttcaaatgcatgtggaattgcgattaagtttccaagcgccgtctccgaaagattttctcgttcaaataccgaatcaataaatccttcatccacatatccttctgtgatcatcctgcttccgagaagatgaatcacttcctcttttgatttcagatcacagtcaaacatcgcaatctcactgtgcagaaactgctgcaggtattcataattcttttgagtttctggttcatattccttcttcttcatcagaaacttctgaatcttcttgatgtctgtctcactcaaaaccggggaaacctgaataaccggaattccttccaattcaatcggaactgtagcaatcacaaaatcttgtttttctagtttgatttctgataatcttgatgctgagaaaacttccctaatttccaaattcgaaaaacttcctgccagcttagcccgcaagaactgagacgtaccaaatcctgtcatgcaaactaacgttgcagtaaatttttgatgttgtttttgtttcattctttcaatcgatgtcccaatatgaaatgtaataaaaccaatctcatcttctgttggattaaatccgtacttaactgtaaactttgacataaagaaagatgcaatttcatattcataaaacaattctttctttatcgcatccagaatcggattgtaagtatacattttactgtgtagtctcagtaccatgcattccaaatgatccatcaaagcattgatcaattcatcgtcttcctctaactgtagatagaactttctgtcacattccatcaacaaatccatcatgtaatcaaacatctctggattgcgttctcttttctctttaagagactgctctttttccattggaacatgaaagcgaagaccactcaaacaaattctcagataacaatcttctgtatccggaatctcaattccaaaggattctgtcagatgttctttcagataacctaacacgaaatccatccgccttgattctcttcccgggatagagccttcatggtccatcgtcttccctgcggataatcgttccagcattacggccagatccagcatcagttcacctactgatatgtcagtgagtataaactgaaatcttccttccatttgaccaatgatttctcttaaatccttcagttctactgaggtgaaatggctttgaatattcgatacagttactttttgtcttccaccggctcttttgagcgcctctaacaacgccgaacgtatctgactttcatttccctccactttaattccatatttcactttcttaatgaagtgaactccataatgttcccacagctcatccaactcattcagatcattcaatacagtagctttgcttatgtaatactcctttgcaagaacctccatagatgtgtaatcatcctgtaagagaagctcaacagccagatgatactttctgacctccggagacagatacaaatctgctgtatcccttgtgacttctttcaggtattttttagcctcatggttgtcatactcaatccagagtcctacaccctgctgactgttaatcctacaggaatgtttctccaactcctcattgatcttcttaatatcagctttgatcgttctggaactaaccttcaatgaagtagcaatctgtgtggttgtcaatttgtcctcatgttctatgagcagcgtaacaattttcttctctctagctaaaagcattttcatctcccgccttcaaattcttgtattccttgctgcttgagcctattatacacagcactcggttcattctacaaatcagatattttcatctagctcatactaacttggtgaaaacaatgtgtgattatgtcgtgtttaacaattgtatccgttgtttttttgtgtatttcgcccaagcaaactgtatctggtttccttttttgacttgaaaattcttgtctcttcctatttaaagtacttttataagaatactttacttcactatcatctgtccatcagaaattagtttcactaacttagtgcaatttctccattattcattttctatttttattcctataatgaaaacataccaaaactattcataactgttctgtactctttgtgtcagacagttacactaatcattactgctttaaggaggaaattataatgattaattttgaatttcataaccctaccaaagttatttttggtaaaaacgtagaagctgaagccggaaaagaaatcaaaaggctcggtggtcataaagtgctcgttcactttggtggagattatcttcaggcgaatggtactttagatcggattcataaaggcctcacagacgctggacttgaatatgtagatttagacggagttgttcccaacccaagactcagtcttgtaaaaaaaggaattgaactctgcaaaaaagaaggtgtagacttcattctcccaattggtgggggaagtgcaattgactctgctaagggaattgcctacggccttgctaatgactttgaactggaagatctactcatgggaaaagtaaaaacagataaaattgcaccgattggctgtatttctacaattgctgcaacaggatctgaaacgagtaattctatggtaattacaattgaagaatacgaaggtcaacaaaatctgaaacgctcttataaccatgattgtgcacgcccactgtttgcatgcatgaacccagaacttacatatacacttcctgtttaccagacagcaagtggagcttctgatattatgatgcacacaatggagcgttacttcacaaatacaaaggatgttgacctgatcgaccgtatcgcagaaggacttctcgttgcagtccgcgaggcagcacaggttgctgttaagactcctgatgactacgaggcacgtgctacactgatgtgggctggaagtctttcacacaatggccttaccggtacaggacgtcagtcagattttgcttctcataaaattgagcatgaacttggcggtatgtttgatgtggctcacggtgcaggactttgtgctgtatggggaagttgggctcgttatgtttataaaacaaatcctgcaagatttgcccagtttgccgttcgtgtcttcgatgtaccagaaaatttctatgatgtagaagctacagcacttaaaggtattgaagcttgggaagactggtgtcataaaattggaatgccaatcaatcttcatgaattaggtatagatcctacagatgatcagattaaagaaatggctgagaaatgcgttgctactggaggcggtactgtcggatttttccaaccattaaataaagacgatattataaacatttataaaatgtctaaataatcaaattactgtcttttagtaaaagtaactccgcatcaaatcttattgtaatagaatatttgtaactgttcaaagccaagcaaaatttcaaaaacagctataaagtgcttgtatttttaagactgtttttgaaattttatttggaggttggctctgaacagttacgtgaattttaaaattaatacgaaaagaggataaaaatggagctgagtatacttttaatggaacagattgcaaaactatttcttatgatttttatgggctatgccgtggtaaaacttggattattaacagatgaagacagcaaagtattatctacacttgtactgtatctgattgtaccctcggtaattttaaatgcttttcaggtagactacacgcaggaaaaagtaaatgggctaaaacttgctggtattgcctccttactacttttgattattttacttttgattgtaaatctgattgggaaattattgaatttgaatgaagtagaaataatgtctatttattattccaattcaggaaatctgattgtgccgattgtaacatttatgcttggtgaaaaatgggtattctatgcctgtgtatttatgggacttcaaaccatttttttctggacacattgcaaaaatgtactcagccacgagaaaggattcaatccaaaaaaaattttttccaacattaatattattaccataataattgcaattactttgttttttgcaaaaatacgtctgccagaaattattacaggaacacttgactcagtaggtgccatgattggaccagcgagtatgtttgtaaccggaatgttaattggcggaatggagctaaaaaaaatattaacggacaaaagaacgtattttatttcgttcatgcgcttaattacaatcccgcttattgcattacttattctaaagataagtggtctcaaaggatggaataaagacggagaacaaattcttttgattgtatttatggctgtgatttctccagtagcttccaccgttacgcaaatgtgtcaagtatatgacaatgattccagatatgccagtgcaatcaacgtactaacaacaattggagccattgtaacaatgcccttaatggtgtttatgtatcagataattatataaaaaatagaattttttcataattaaggcaagccgttgtaacaacggcttgccttaatgtaattacaataacttttcttttatgcctcagagaaaaatttctccttcttcacaagtaatgtctccaacagattatacacaacatccgcaactgcaagctccggacgaagccgttcttccggcaccggaattacattttcaagcggtgccatacctgcacgtgttgcatttacaagaatattgctctcgctaacaacctctgcaagcttctctttattatcaagatcctcaataaacactgttccgatgattaccatctcctgacctttcacttccactccatgttcttttaggttgcgaataaatccgactccatcagtgatatgtcctgtcatgttgcatctattccaagctttcaaagctataattctgcatggccggagaacctgaatgtcctaccgaagagccgatgaatgcgtataatcttatatgtccattaattcttctttccattcgtaaactcctccatattaaatatcagcagaaatttttcaatcatttttgcatttctgccacgaaatgtagctacaatatatcatcatcgcttcaaaacttctatgatttaaagtgtgaaattatcatttaattctaatcaatcagatcattctgaaatcttgacagatgctcatacggcaagatcagtcttcctcgaaacaatccacacccgtcattgatcaaactgttattcatcgctgcaaacatatttacatccagcttcgccagatccaatcccaacagcttcattccgcgctcatacgcctcatcaaaataaatgcactcacctcttggaatcgcatttcttctggcgcgctctttctcttgttttttctcatatcccagatggtttgccggcccaatctctgcaatatcatccatttgctttgtacggatctgaacctcaatataacttcttgaacagttatcatagaatgtaatgtgcagtgactggtattcatccggctggctgtctgaaatataatctctgtaatatggtctgacattgtcatccatgagtggggaatgactttccatcacaccatttgccggctccgctgtaaaccctctttcctcaagaaagcccggtagtacattcgctatcccgtacagacactccagttctgcgatctgacgctcttcttcattttcataatgacattttggcatagaaatcacgattcggtatgcgatcagatcacgaaaacaactaaggctgctctttaactctgccgttgtcggatatgttccgtacttttcatgataatctgaaatatattttacaatataaccgttaaatttctcttccgcacggatcaacgacttgattcttccctttactgtaaatgcaagatatggatattcttttgtcatatatttatagaattcccgaacctgctgtgactgggtcgtaaggaattcattatgttccaaaagttctctgatctgaatcaggaaattacaatgtatcagatcaatttcattttttgtctttcgtgcatcttcccttagatctgtaatgtaattctgcagcaccttaaaaatggtatcgcccgaatacagataatcatttaaagttatcataacgtatcccgttactgaaaacttataaaaagttataaacttccatgtttcattcctacttcaacgagtatgcttttgatgatataaatatctatctactcacaagttcttgtactctccataggcgtaaattccggattaacgtatccgtacatatttgcattaacgtttcagtgttagcttgcaaatctttctccataagccttgagatttatagatgcctggaaatctctgtcaatcatattcccacactcacatctataaactctgtcagataatttcaaatcttttttgatgttcccacaacagcagcaaagctttgatgatggataaaatcgatcagccacaataagctggattcctttatcactgcacttgtattcaagctgttttctaaacgcaaaaaatccttgtccctgaactgctttggatagatgtctatttttcatcattcctctgacattcagatcttcgatacagataaatcttggttttcgatttacgatctcagatatggtctgattcaaatagtttttacggatgtttgttaatctgtgatttcgttttaataaaagtttttcctttttgattacattatttgttttacagtaactttctcctttcttatttttctcgtaagaacgagagatacttcgctgtaatctgcgtttctgtttttctagtttcttcactttctgactcttattaatgttcttatatttaacagcatcagagcagacagctaaatctttgattcctaagtctatgccaattccatcatcattaagtgtttccttacaatcaggaaattctacacatacactgatccaccagttcaatccgtcaaaggatattctcggattcatatatttaacatctgttggaatacgttcatgttctgcaagtcttacccaattctttttttgcttatttgctttcctgctggaagaaaagccttccagcttaacgtgggtattactgaattgtatcttaacgttgtcctgataaaacttcggcattgatctctttctggacttgaatcttgggaatttttgcaaacccttgaaaaagttcttatacgcagtacaggcatctttaattgcctgtttggttacattatttgaaatatttaataaccatgcgtattcatcagaatgtctaagctttgtaaattcttttctgagttctgaatctgaaatgaatttgccacctttttcataattttctttttccctggccaaagcccagttataagcaaatcttgaagctcctgcgtactgaaacatcttagttttctgtacgttgtttggtatcaacattacttttatggcttttaccatctgtttcctcctgtatcaattctcggataagtttcttagctttgttcgctcgttttccttgtaatttgcaactgaatactgtgattatttgaaccagctcttcaacaagttcctgctgttcagatttttcagtattatcaataatctcaatctcacaattataaagtgaagcgatatattctatcaactcaaaaccaaatcgcaatagcctatctttatataaaacaacaaccttttcaacctgattttgagagattcgcctgatcaattcctgaagcccttttttcttataattaatcccagaaccgatatcacttattatctcaaacggctgcccttttgctagaagatatgtcttgacattatcaatctgtcgttccaaatcatctttttgtttatggctggaaacgcgacaatatccaattgtaatgcgatttttaggctttacatttattacttggttgagttgctcatcggaataatatctataaccacttaccgtagtatgatgcggatgaagttttccattggcatcccaatttcgtaatgtctgagcagatacgcctataatttttgaaaattcatgtatagaataatatttactcaaagtatcaactcctttcaataatattctactctaatatcttataaaactcaacaccgtattatatgattttataatttatatttaactgtaataccctccacgaaaatgtatctctgtgtttttcattgcatatttcttatcagcacgccaaacatgatggccttatttcatctattataacaatccgatgcgacaatcgccagtcatggagctacaaatgatacttttcttgatttttttagagaaattatataaattttgtctaaaaaacttgaaatttttataaacaatcctataatataagtgggttgaaaaacgctaacatttatgttttctggaggtgtttgtatgattagttttattatttgtttagcgttacttattggcggatattttgtttatggaaaggtggttgagaacacattcgcacctgacgacagagaaactcctgctgtcagaatcaatgacggagtagattatgtcgttatgccgcaatggaagttattccttgtgcaattacttaacattgccggtcttggacctatttttggtgccatgcagggtgctttatggggaccggtcgtattcctttggattacattcggtacaatttttgccggaggtgtgcatgattatttctccggtatgctttctgaacgaaatgacggagcatcgatttctgaggtatgtggaatctatcttggaaatgttatgaaaaatgttatgcgtgtattcagtgtagtacttcttgtcatggttggtactgtatttgcagtaggtcctgccggcttgatcgtcactttgcttgggaacaaaggtatcaccggacttcttgcaaatcctgaattctggctttggattattttgttatattattttatcgcgacctttatttctattgataagattatcggacgcatctacccgatttttggtatctgtctgatcatcatggctcttggtgttatcatcggtatcttcacaaatccgaattatacaattccggaaatctggagtcactttacaaatatgcatcctgacggaaaaccaatctggagcttcatgtttatcactgtagcatgtggagctatttctggtttccattctacacagtcccctctgatggctcgttgtatgaaatctgagaaacagggacatttcgtattctacggcgcaatggtagcagaaggtgtgattgcactgatctgggcagccgcaggatgtgcactttacaaagtaacaggtggtctcaacacaggtttaagcgaagttcttgctaacggtcagtcagccgctatctacgatgtgtgtattaagacaatgggaggcatcggtgtagcattggcaatgatcggtgttatcgtatgtccgatcacttccggagatactgcattcagaagtgcccgtcttgtacttgcagactggttcaagattgatcagaataaattgcagaaacgattgattctctgtgtaccgcttctggcagtcggtgcttttgtaggacatcttgattatgccattgtatggagatatttcagttggacaaaccagactttagcaatgatcgttttgtggacagcaagtatgtatctgttccgcgagaagaagaattactggattacagcagttcctgcaacatttatgagtgccgtttccatgacctatttcttctgtgcagatgaatgtctgggattctctacagcagttgcttatcctgtaggaattatcctggcagcattgttccttggaatctttatctgggcaacaagaaaacctgcgaaaaaacaggcttaagattatagaactgtgaaaagcagacagacatccggtttttcacagttcttttaaaatatgcaaatgaaatgagatgatattatgtttaaaccacaacgacttggaactgtaacactcccggatgatgaattgacagctgacaaaaaaacttgcagaaaaataggaccttgcggtgttggggaaaaagcaatttatttaaacagtttttattttgacagacattattacatacccatttcttccgtagaaagaatcttcaaaagaattgctatgagcaaaggtggttttacaggaaaaggagcatttggaacgttatcctatctcgtagttgtatatgaaaatggaaaagaaaaacaatgtaacttcaaacatgaagaagatgtggatcgtcttttggcttatattgaagaaagatttcctcagattccgctgcacagcatagaagccgagcgaaaactggaagaaaaaagaaaatggctggaagaaaagcagcgcgagcgcattcttccggaagaaatcaaaaagcggcttaccaaacttgaacgcgcagaaaattatcttaaaaagcaatccgattactacatggatctgagcctgtcggcgaagaaaaagagaacctatgacagaagcaatcccgcttataaatgggtcgctcttgctgttgtaatattgggcatcggagcattcctttatggaatctactcccttctgactcatgccggattcggtatgtatttcctgttatttggattggcagcaatttttctgttcgccggagcaaatgtattgccgacttctaaaaacaataaaaaatatatcgaaaaccaactggaacgatccattcagcaaatggaaacatacatccaaaaatatccggattttccggttcctgcatattatgcacatccgatcgtgttaaaaagaatgcaggatattatgaaagaaggtcgtgcagagacaattcctgaagctctaaagcttttaaaggaagatttgaaagcattgaattctaacgtcgtagtcgaaaaagaagagtatgatgaaatcgttacgatcaaaccaatgttcctggtaatgggttataaatagtctcatccgatttttgccctctcaataaagaattgctactgtccctctatttttagaacagcagcaattctttttcacattcatttcattttacaagaaagtttttcacattttattctttaattgttcccttttttatattctcctgaatgatctgatccacaacttcgaatatcttttctgatcccagactcgtctttctctgacggccataaacctgctcagcatacactccatgctctttccaatcttttccaccattgctgttatttagcatcagcggctgtagattatccattgcatgtgcgaacttagattccgctgtttcaaatgcctcgaactcatcaaaaagagaaatcagctcttgtttctgatcttccggaaggattgaaaaaattctttccttcgccgcatcttctcttgctttctgagttttcaaaccttctgtatcatatgcatacgtatcacccgcatcgatctccacaatatcatggatcagacacatcagcattacctttgcaatatccaccgattcgtttgaatgctctctgaaaagatatgccataatcgccatatgccatgcatgttctgcatcgttttcccgtctgccatgctctgagagatgtgtctgtctcagaatatttttttccttatctatttccaatgcaaaatcaagctgtcgtttcaatctttcatccatttttctctgtctccttgttctaaacttcattaccttaagatgaaaattaatttgcttttcgtattattttcattctcagtttttatttcagttcatccaggatagatgctccgatcgttccctccggcatctttacgtcgaaattatctgcaattgttgcaccgatcactgcaaatgtatccgaatccggcagttttccgtatccttccatagatggagaataagcgaaaaacggaaccatttctcttgtatgatctgttcctgtatgtgtcggatcatttccgtgatctgcagtaatgatcagaagatcatcctctctcaatccaccaagaaattctcctaatttcacatcaaatcgttcaagttcctctgcgtatccctttacatttctgcggtgtccccacaatgcatcaaaatccacaagatttacaaagcacaagcctttgaaatctctctttgaaatttcaatcgtctgctccattccgtgaacggagctcttagatttatttgattctgtcaaaccttctccatcgaaaatatcaaagatcttaccgactgagatcacatcatatcctgcatctttgagtgcattaagagctgttcttccgtatggtttcagcgcataatcatgtctgttacttgtacgcttaaactcaccttttttctttccaacataaggtcttgcaataacacgtccgactttccactcatctttcatcgtaatatcacgtgcgatctcacagcagcggtaaagttcatccagtccgaatgtctcctcatttccacagatctgcaatacagaatctgcagatgtatagacgatcatatgacctgttgcaatctcttcttctgcaagttcatcaagaatctctgttccactggcactcttgtttccgatcactttatgtcctgttctcttttccagttcgtcaatcaattcctttggaaatcccgtctctgtaaatgtcttaaatggcttcgtgatatgaagtcccatcatctcccaatgtccggtcatcgtatcctttccggtacttgcttctttcaggaaagaatagtatcccatcggtctttctaccggtgccacctgtttcagtgggtgtaaattggcgattccaagtttctgaagattcggaatatgaaattcatccacaaactcagaaatatgtcccattgtgtctgttcctgcatccccatactctgcagcatccggcattgctcctgcaccgaacgaatcaattacaatagtaaaaattcgattatattttttcataaaaatcacaccccattacatgtttacaacaacttttgtaacaagctccttaaatgattttgctacgcgatctgctgtctcctgtacttctttatgattcagttccacttttgagattcctgctgccatatttgtaatacaggaaatcccacaaatctccattcccatatgacgtgctgccatagcctcacatgctgtgctcattccgactgcatctccgccccagctctgtgcaagtcttatttctgccggtgtctcatagttcggtcctgtaaactgaacgtaaacaccttcctgaatctcaacgccacactccgctgcacacttgcggatcacatcctgaagacgcttgctatacacttcgctcatatccgggaatctcgttccaagctcctcgatattcggtccaatcagtgggcttggaactcctgttgtaatatgatctgtgatcatcatgaaatctccggctttataagatgggttgcatccacctgccgcatttgtaagaaggatcttcttcgccccaagcattcccatcagacgtgtcggaagaacaacgtctgacatcttatatccctcataataatgaacacgtccctgcatgatcacaaccggtgtatcctctacataaccaaatacaaaacgtcctttatgtccctttactgtagaaaccggaaatccttcaatctctgtataatcgatggtctgctcaatcttgattccatctgcaaaatctccaagtccggatccgagaatcagtgctacttctggtttaaaatcgatcttctttcttacactttcaagacatgtaactaatttcttatacacaatttccacactccttttctttgttttctgaacttgaaaactggtaacatttcgtgtaaatacttatgcgccataagcttcccccatcatccggtacaatttatcttttacagaatctgttgcaaaagctacatctgctgcatttttcatcaaacacaggatttcatcatctcgaattccgtatgttttctgaataaattccagttcctttgtcattgttgtatcactgaccgtacgattgtccgtattgaccgttacttttaaaccgccattcaagaactctctgatcgggtattcctccgttcctgctactgcttttgtctgcagattactgattgggcacatctcgatcccgattcctttttcggcaagttctttgatcagatcactatgtcctctcattgcgattccatgaccgattcttcttgccccagcttccacggaatctatgatgttctgagcacttccacactcccctgcatggattgtgaacggcatcccaatcttgtaggtgttctggaacagatttttaaactctgacatagggtagatagcttctgctcctgcaagatctgctgcacacactcctgagccaagatattctctcgctgtacgtatcatgcgccagttcatttcttcgctgtgatgccgcatcgcacatacgatcagaccaaactcgattccgaaatctttttttcctctctcaagaccttttaaaactgcttcaatcactttattgcaattcatgtcttctgtctctgaaagaagtggtgcaaagcgaatctcagaataaatgacattctcctgtttcatgcttctgagcacatcatatccggcttcctcaagaccctcttcgtctcttaaacattgtcccggcagatcaaacttttccagatattctgcaagacttgtacagtcatctgacacgctcagttcttcttttcctaccggtcttccaagtctcttttccacaaatccctgactcagtgatccgtccagatgacagtgcaattccacctttggcaattttataatatcttcctttgtcattgttaaatcccccgttactgaaaacctataaaaagttataaacttccatgtttcattcctacttcaacgagtatgcttttgatgatataaatatctatctactcacaagttcttgtactctccataggcgtaaattccggactaacgtatccgtatatatttgcattaacgtttcagtgttagcttgcaaatcgttctccataagccttaagatttatagatgcctggaaatctctgtcaatcatattcccacattcacatctataaaccctgtcagataacttcaaatcttttttgatgtttccacagcaactgcaaagctttgatgatggataaaaccgatcagccacaataagctggatccctttatcattgcatttgtattcaagctgttttctaaacctaaaaaatccttgttcctgtactgctttggataaatgtctatttttcatcattccgctgacattcagatcttcaatacaaataaatcttggctttcgattcacgatctcagatatggtctgattcaaatagtttttacggatgtttgttaatctgtgatttcgttttaataaaagtttttcctttttgattacattatttgttttacagtaactttcccctttcttatttttctcgtaagaacgagagatactacgctgtaatctacgtttctgtttttctagtttctttactttctgactcttattgatgttcttatacttaacggcatcagagcagacagctaagtctttaattcctaagtctatgccaactccatcatcattaagtgtttccttacagtcaggaaattctacacatacactgatccaccagttcaatccatcaaaggatattctcggattcatatatttaacatctgttggaatacgtccatgttctgcaagtcttacccaattctttttttgcttatttgctttcctgctggaagaaaaaccttcaagcttaacgtgagtattactgaattgtatcttaacgttgtcctgatagaacttcggcattgatctctttctggacttgaatcttgggaatttttgcaaacccttgaaaaagttcttatacgcagtacaggcatctttaattgcctgtttggttacattatttgaaatatttaataaccatgcgtattcatcagaatgtctaagctttgtaaattcttttctgagttctgaatctgaaatgaatttgccacctttttcgtagctttctttttccctggccaaagcccagttataagcaaatcttgaagctcctgcgtactgaaacatcttagttttctgtacgttgtttggtatcaacattacttttatggcttttaccatctgtttcctcctgtatcaattctcggataagtctcttagctttgttcgctcgttttccttgtaatttacaactgaatactgtgattatttgaactagatcttcaacaagttcctgctgttcagatttttcagtattgtcaataatctcaatctcacaattataaagtgaagcgatatattctatcaactcaaaaccaaatcgcaatagcctatctttatataaaacaacaaccttttcaacctgattttgagagattcgtctgatcaattcctgaagcccttttttcttataatcaatcccagaaccgatatcacttattatctcaaacggctgcccttttgccagaagatatgtcttgacattatcaatctgtcgttccaaatcttctttttgtttatggctgaaaacgcaacaatatccaattgtaatgcgatttttaggctttacatttattacttggttgagttgctcatcggaataatatctatagccacttactgtagtatgatgcggatgaagttttccattagcatcccaatttcgtaatgtctgagcagatacgcctataatttttgaaaattcatgtatagaataatatttactcaaagtatcaactcctttcaataatattccactctaatatcttataaaactcaataccgacttatatgattttataatttatatctaactattaataaccttcctttgtcagcttttaattcgtataatatatccttttcttcacattataccaaatttaatggtccaaacccaagaggcatcagctcttctaaagtataaatttcatatcgttctttatccactgcaagaatgatctgaaatgtcttcggatcacaaaattccatcataacctgacgacacacaccgcaaggtgcagtgtattctgtcagttttccatctttacctcccacaatgcagattgcccggaactctctgactccctcgctcactgccttgaaaaaagcagtccgctctgcacagttagtcggtgtataggatgcattttctatattgcatcctgtaaaaatctctccgtttttcgcaagaagtgccgctccaactttgaaattcgaatatggtgtataggaaaacttaagttgctcaatcgctgtatcgatcaatttctcaaccataacctgttccatcacagcctcctcttttctttcatatgctactaccagttttcttatttattttcttggtctgctttgatcaatttacgaattgcttcaacggctacctggattgccatatctgtattatgagcaactggattctcaagaccaagtttctctctttcctgatttgcaacaacaagaaaacaagaacctgctcttgctcttaatttagatgcacagataaacattgctgctgattccatctcagatgcaaggcatcccatcatcttccatgcttcccatttattgataagttcatatcctaccggcattttctctggctcatgctgtccgtaaaatgcgtctttagactgaacaacacctgtataatgtgtaaagtttttctcttttgctgctgcaaccaatgcatttgtaacatcaagatctgctactgcaggatactcgatcggtgcatattctttggatgttccttccatacggatcgcaccagttgcgattacaacatcaccactcttaatctccgtctgcattccgccacatgttccaattcttacaaaagtatctgctccacatttatacagctcttccatagcgattgatgcagacgggccaccaatacctgtagatgtaacgcttacctttactccgtccaatgttcctgtataagtaatatactccctgttatctgctaccaaaaccggatcatcaaaatgctgtgcgatcttaacgcagcgcttcggatctcccggcatgatcacataacgtccaacttctccttttgctacctgaatatgatattgtctgctcggatcttctgaataatttttcataatttttccacctctctaccacttcatatcttatgccattgagggcacagctaccttgaacagtgactgtaaaaattcttgacttcttttaatattactttactctaatatcttataaaactcaagccacctatttattgcataaaataaaactcaacaaactttcaataatttcatttgaaagtctcttttattaaaaaaagggggtagtctccaaacaagaaactcgttataataggggtcagaaaatggatggaggaattcaaaatgaataatgtaattgagatgaagcacccactgattcagcataagatttccaaattaagagataagaatacaggaactgctgaattccgtgcgctggtagaagaaattgctatgttaatgggatatgaggctttaaaagaccttccattagaagatgtggaagtcgaaacaccaattgaaaaatgtatgaccccacagattgcaggcaagaactttgctattgtaccaatcttacgtgccggtcttggaatggtaagcggtcttcaggctttagtcccgactgcaaagattggtcatattggtctgtatcgtgatgaggagacacatgagccacacgaatactactgcaaactgccaagcccaatctctgaacgtctgatcgttgttacagatcctatgcttgctacaggtggttctgctgttgctgctgttgattttatcaaacagcatggcggaaagaagatcaaattcatggctatcattgctgctccgaagggcgtagaacgtctgatggaagcacatccggatattcagctgtacgtaggacatattgacagggaactaaacaaagatgcttacatctgtccgggacttggagatgccggggatcgcattttcggaacaaaataaatagattttgcaaaataaaaaagatatcgaagcacactttcattttctgtgtgcctcgatatcttttttatctgtccctggccgaacagatcatttggcttatattttatggtatatttttacatggcagtaaatttggtttaaattcttatttaataaaacttacatgtttgcagatctcttcgatcgctttttcttttctctcattgaaaactactttgttctcttcaaacaggttgcgtccctctgtgtcaatagatacgatcagtggtccgaactcttttacgcggcagtgccacagtgtctcaggcattccgaggtctctccactgagcatcaacaatttcctcaacttctgttgctgcaacaacagcatttcctgccgggaatacgcagtggattgctccgaattctttacatgcacgctctgtgttttctttcattccaccttttccgatgatcacacggacaccagactcttttacaaattcatactcaaatttttccatacgcatacttgttgtcggtcctacagaaaccatttcaaatttgtcattctcaagcggtctgataattgggcctgcgtggaagattgctgcatcttttacatcaaccggaagctcacgtccttcttcaacgagtcttctgtgtgcaacgtcacggcaagttgtcatgcttccgttcagataaatgatatctcctgcatgaatatctttgagatcctcagctgagactggtgttgttaaaatcttttttccatcttttatttccagcattataatgtcacccccgaatgtgttgtgattgtgtagttaaggtccttatcaaatacaatgtgtccacgtctgtgtgaccagcatccaacattaacagcaactccaattgtagatggatgtcttgctgtattctcaatgtgaactcccataacagaatactttccgcccattccctgaggtccaagtccaattgcgttaattccgtcctcaagcagtttctccatagatgctgcacgttcattttcattgtggcttccaagcggtctcataagggctttcttggaaagtaatgcagctgtctcaacagatgtagcaacaccgacaccaacaagcagtggaggacatgcattcagtccgtaagatgtcataacatcaagaacaaattttgtaactccttcgtatccttcgcccggcatgagaaccatagcttttcctggcagtgtacatccgccacctgccatgtatgtatagatttcgcactgatcactgtccggtacgatatcccagaatactgtcggtgttccttttcctacgttctttcctgtgttgtactcatcaaatgtctcaacactattatgacgaagcggagcttcaaatgtagctttcacaactgcttcttttaaaagtccttccagttctccaataagtgggaagtttgttccacattttacccagaactgtaatactcctgtgtcctgacaacttggtctgttcagctcttttgcaagaacctggtttttctgcattgtctgataaataacctttgaaagcgggctgtcttctttctctgcaagctcgtcaatctttgctttgatgtcatccggcagtactttaccaatataggaaacaaagttcgccatataagtagtaagctgctctacctgtgcttttttatccatttttaggtctcctttcattactgctgcaatttccagtaactttgatgattaggttagttcatgttttatagtttcttttatatctcactccaacaacatgtcttcttacgggaagaatggaaatgcgattggaaggataatcatacttacaactgttgcaatgataatcaatgggaatcctgcttttacatagtccataaacttatatccaccggctccgactaccattgtgttcgcaggcattccgattggtgttgcatatgcgcaggaaccaccgattacacatgccatcagtaccgctcttggatccgctcccatcccctgtgcaattgagagacagattggaaccatcagtgctgttgttgctgtatttgacatgaagtttgtcatgatacaacacagcaggaatacaacaagtgtcaggatatatggagatgggttcgcacccaacgctccgattactttattagcgatcacttctccggctcctgtctcttgaagagcagatgcgagggaaagtgtaccaccgaacagaaagattgtcttaagatcgattgacttaagagcgtccttttctgagataactcctgtgaggatcagaagcagtgctccgattccaccggagatacaaagcttgataccgattttatcttcaaagatcatcgccagcaatgtaaataccaggatgatcagtgataaccactgtttccatttcggcacattatcgaaattctttgttgtatcaaaagctccgtcatccttcacatcgtgacttggaagcagtctgtaaccgattgttgcatagaaaataattcctacaatcagaatcggcataccgacaactgcatactcaaaaaatccaaattttagtccaatttcactaagtgcactctgtgcgatcaggtttcccggtgcaccgatcagggaaagatttcctcccatagctgctgcaaatacaagcggcatcaaaagtcgggatcttttgtatcctgattttgctgcaattccgataactaccggaatcagaactgctgcagttcctgtgtttgacaggattccactcatcaatcctacgatcaccatgatcgcaatgatcagcattctttctgtcttggcgaacttcgtaacaattcctccgattttattcgccattcctgtttcaaacagcgcacctcctacgatgaacatcgctacaaataggattacgttactatcaatgaatcctgcaaaggctgttttcacgtctaaacccccagtcactacaagaccgatacagacaatcattgatgttactccaagcggtatcttttctaatacaaacatgattaccgcaaacaggagaaacagaagagttattgttgatggactcatatgttttcctccattcctttgtttctgtttttcttttacttcttaactttttcaaatctttttcagctattattttagcttcgctttaagtaatttccggccgtttcgattacctctctgctatggttgtattatagaaaatacaatcgaaaatgtacattctgaaaaaaatatggtactataagaaaaaactatggaaacctttaatacgcaataatttagatataggaggtttttacaaatgaaactgacacaactcgaatatttctgtgttgctgcaagataccacaatatcacacgcgcatccaaagagctttttgtcacccagccttcggtatccaatgcgatcaaagctttggaggaagaatttggtattaatctcttttacagaaataataataaactgacactgacaccggaaggagaaaaattttatcaaagtgctgaggagcttttagcccatgcagatgcagtcagatctgaacttcatgaactccggaagcagatcactcctatccgtattggaatccctcccatgcttggaaccatttatctgccggatatgtatctttctttgaaggaagaattccctgacgtggatttgcgactatatgaatatggatcgatcaaagcctgtgaacttgttttggaagagaaacttgacctcgcgattgtcaatgcagaacagtctgcgattgataaatgcaacctccatgttattgataatgaagagctgctcttctgcgtatcaaaggagcatccacttgcagaacaatccacgcttcttctaaatatgttgactgacgagccattagttctttttaacaccgattctgtccaggttatgacactgacccgtcagttcaaggccgcaggagtaaatccccatgtggtactaaacaccagccagatcacaacactgatcaacatggtaaaggccgataagattggctgctttttatataaatctatggtagatatgtacccagatcttgtcggaatacctgtctttccggcaatcgagcagcgcattggtgttatctggagaaaaggaaagtatcagaatgcggtaactgagaaagttattaaatatttgaagaattattaatcattatgccaattattttgcttgacaactcattatttttaagaggcggatacattgaactatacccgcctcttatagattctaattctctttttcaaaattgcttttaccatgattcaaaacttctaatactatttcctcactgcatcctgtaagaactgaaatttcttcagctgattttcccagctgatgcatattaaggataattctctcttcacaactcttctctccaagttttattcctattttttctccaatttcctttccaattgcctcaccgcgtcttctggcactagacatctgtgaattataatccctgagagccttttctcttgcctcatactccagtcttttcttctcatccgcactcattctctctaattcttcatatgctttctcaatatatggatctttttctgccattttctttaagtcctccttgcatttcccactgagaaaccgcatccagcgaataatacctgactcatttctatcttctgtcggaagcttgccaagctctagaacataaatctccatcaggtctgtataaacctctcctgtctctacatcacaaaatgtaatcttacggaaacatctatcatcctttgggaaatgaagaaaatcaagaatgctgacatgaatacatttctttaatttctcgtaaggctctcctcttttaatctgtcccgtatacattttccctaaatagaacagtactctgtttggccaaaagtcaaactgtactacctgcatctccaaatccgtttgtgtcccgtctgcaaacagaacccttacatccagaattccaagtttctcatcctgatattctggttgaagaattgttggaagtaactctgtatcttctaattcttccggattttttcccaacaatgcagataaaataccttttcttacttctttattttgcatcagttctttgaagcagaagtctacagtgggtaacatgataaaattgtcattttgctcagataactgacgtttttctattgtcattcattctcctcctatatgaaaacaaatcgaagattaaattgtactggatcttctctcaacattacatagatggaaatgtattgggcagttatctgattttctacttaaaagaataacatattttctcatcatgtgaaacattaaatttctattattcttcttcaataacagtaaccattacatagcaaatcctgtacgtgatatcttatataaaagctgttcctccatttgttttcaatattttttatttgtcttaatggaaatattacttatcttgatatatgattcttgaaactttttgattatcagacacaaagactcaatccgtgacttataacatcttttgaactttcgaaagttagatataggatatctgattaatttataaaatacaatgttttttttgttgatatcttaacttttttgttggtaaattgtggataacttttttcaggagataatatacttgcaagacttttattagaaaaggaaactgcaaatgaaaaagtgagtagagacgtgctactcacttttttctatcttctattcatataagaaatcgatgacaacgtctgcaggtgcgccggacagatatctctgcatgccagtgatttcgaacattgcttcgcaaaatgttcttcatactgtttctccaatgcccgctttcgcttcagactggaagaatgcagaagatacgcgttatttgcaaactctgcaccatagaaatcatcttttgccccaagataattcggacatacttccagacaaagtccacatttcagacactttgctgccgaatactgatgatcatgctctttcggatctggatgtttccgaattccaaggtacatcaatgcttccttctgacgttcccatatcacagatctgtcaacgatcagatcttccacaaccggaaattttgtaagcggttccagccttaaaatctctgtatcatctgtattaatgaacactccacatgccaacgcaggatgcccattgatcaccattgcacaacctccgcacattttctgcatacaaccacattcccaacggatttttctacattgttttcctttgatatcttccagctggtcacgttcatttaacttctcaagaatcgcagctactgtaattcttccctctcctctgaaatgaaaaacttgccaatacggcgctgatcttcggtcatcctgtcttttgattcttactttcatctcacagcgcctcccttttctcctgactcctgttcaaaataaatcctgattttttcgtctttaaactctgcaacggaacatttcatgaattctgatttttcacctggaaaatcttttcggaaatgagctcctcttgattcacgtctttccacagcactcataagtgtcgcttttccaagaacagccatcggatataatctgtaattttcataaacagataccattggatcaattggaaatgtcctcagctcattcaagctggaatccaatgcgtaaatactatcctgaagaacttctccatcacggatcaaatccatgccataactcatgatcttcattaatttacgcagtgttgctgtcgctgaatacttgccccgatattctgacatctgttccatacgatcgattttctcctgctcatgctcaatataaggaacaaacaattcttcacatatcggctgcccctgtccctcatgcaccgcatgcgctgctgttcttcccgaatgaactgctgtcatcaatgaatttccaccaaggcaatttgcaccatgatattttgacgcagcttctcccacagcatacaatcctgcaatattcgtctgatgcattccgtccactttaataccacccataaagaaatggattgctggcgttacagggatcgattcttttgctgtctccagataaacctgtccgggacacattgcaatttctcttgcgacaagatctcttgacatcagattgccttccgtaccatacttttcttccataaaataaacactgtgacttctattcttataataaagtctccaaccttcacttctgacagattccgagattataaccctcttatttcctcgctgaaccgtggtcggataatactggataaattcgagatttctcagctgcactccctgtaaaaaaagctttcctgtcacataaccatcatttaattcagatccagtggtttttccatatagcttgttcattccaccggtagcacagattactgcatccgcataaaccggaatcaacattctagattctggattataaaataacgctccataacacttttcatcccgaataagagcagaataaaaatacaatccaattttcttttctattttacctttaatctcatactccaggcatttctgtgtcattgccgtaacaatctgttttccaatggaattacctgaataaacagtcctttttctactctgtcctccggaagctttcactttccatgtatcatcttcctttcgatcaaaaagaactcccatctcatccagccatttcagatgttccggtgctttctcacagagatttctcacatcctcttctttttcaagaaaacacccactctccagcgtatcattcgcatgccacactacagaatcctcctctgcggtatcaactactgcattgattccttctgctgccataactgactgtgtacgttctgactgaaccggtgatacaagaattacctcatcttcaagttctgctgcttctattgcagcagacatcccggcaattccatttcctataatcaataccttcatttgtcatcttctctttcctaaaaatctcacctgttcctacaatcttatccgcgcagccaccgtaagaaccattaataatccacagatgatccatgttacataatccacaagcttctccatcctatcgttcttcaacaaaccaagcgtcagcatagaacggctgaacgatacactcagatgcagaaatgccgcacctgcaaagagaatctccgtcactaatacaagaaactttgctccaccagaaaatgatgctccacttattataagatgaagtactctcatgtgtggatacaataaaatcagtataacaattccactgattctctgcgtaattaatctccaattctctttcctgtatctgtgaaaattaagtattccacgtcttggataataacttacaatacaaagaactacatgaatcaaaactgtcgccacaatccctcctgcgagtatctgacaatcagaataatcctgtccacctgtcaacataggaatggacatggtaagcatatgtccaagtaagaataacgtaagcatccaggaacatactgcgttccatttttttatcattaatcagcaccccttctgtatcttattctctctacttttaatcttccacataaacagcgcgggtacgctctccatcttcgatcaattctacctttgaaaaactttgtatatactgcttaaattgtgagtatccataatcacgtactttaaaatcaccaaactgaatacgaattcgattccccagtgttccaagagagatcccctgatcccctgtcatctgaatctgtcggataatatactcttcaagcatatctttcttactcttatcttcatacagagtaactgaaactttcgttccttcctggatcagttttaatttcggtaaagtttcaaggaacttggataacaggctgtaaccataacgtcgaacatcaaagtccggatatactttgaccagccggcttccaacttcaccaagcccggtttccctgtcgttattctggttttccgtaatgatcttaactacgatttcttctattttttcctttgataccttttcaatcttttcttttgaaccttttccattcaacgatgataatgaagcaccggaaattttcttctgtccccttccaaacacatgcggatgataagactttccttcgctctcttccttctctatcgtgttgtcttccagaagcacctctaatacggtgaagatatcacaggctttacggaacggaagcggtgtcttgtcctcgcccattccgattaccatctttccactttcacgaagccggcttgcaagctttgtaaaatcactgtcacttgataccagacagaacccctccaattcacttgtatagagcatgtccattgcatcaatgatcatggcagaatctgtagaattctttccctgtgtataactgaactgctgaatcggcgtaatagaattttgaagaagttcttccttccagctcgcactgtttgactttgtccagtctccgtaaattcgtttgtaagtcacgtttccatatttagataattcatccaggattggcttaatatattttgcagatacattatccgcatcgattaagagtgcgaaacggtcttccatgtctgatactcctctcctgcaagattcttccatgtaaatacaccgttttcataaatcatataactgtgctcggatccttccttcggaatcgaaacagaacctggatttaagtactgatattttccaccgttcatatcaaggatttcctcacatgccggaatgtgtgtatgtccgttcaaaagaatgtccccatcttttaacattggaagattatgtggatgaaacacatgtccgtgtgttgcaaagattgtaatatcactgttcttttcttccggatctcctgccagattcagataacagtaatctgccagaattggaaactccaataccatctgatccacttctgtatcacaatttcctctcacacaaagaagttctttcttcattggattaagcattgcgatcactgccttcggtgcatatccttccggcagatcatttctcggtccatgataaagaatatcccctaataataataacttgtctgcgccttctcttttataagcctcaagcatctgttcacaataaaatgctgaaccatggatgtcagatgcaatcattaatttcatttttcatttcctcctgtctttctaaatagtttctctataataaatgaaaaaagcagtgactcctttcttgagacaccgcctcttattattttgtgtctgtggatattataacacagaatgaatcacagagaaaaatattttcctacaatttcaaaaggcgccggacccacactcagcacagctttatggaattctttctgggattgatttccagattttatccattcctttttcaactccagaaattttatatatccgatataatatttcaaataatttcccggcgatcccagaatcagattatagattttatcaaccgttttagcatctttaattccatatctcgcataaaattctaccgtatccattctgctccatccttcgtaatggattcccatatctgccaatgcataaagtgcaagaatcactgaactgttcttctgaagaattgctgcctgagtcttagataacggcatcagataatagctgcacatctccgcataagttgcccagccttctacatatccgccaaaatttaaaatactcctgatgggatcaggatccgtgctttcaaaaaagattgtctggtacagatgtcccggatacccctcatgtgccaacgttgtaaacagtgtcaaatcatctcgcatctgtatttggtttacataaattacattttcttctgtatagtcaattgccggtatcatataaaatgcgggacttaaatgttcctgcatttcctccggtacatattttatccgcagagaagttttcggaatctcaggaaatgcagtccctatccctttttttaacttttctaagattctttctgctttctcatcttccaatattgctgctgcctgcttcgcttcgttgactgcttcttccataccggtaatatcttctgaaatttgtctgcgtgttagttgctcaagctcttgaatcgtgtctgtcactcctacactctgctgtatataccattcgtagtattttcttccttccggaaaataacacaatcctttttcattcgttcccttccctttcaattcctcaaccgcctgtatcaaatcctcatacgccggataaacctgctcttccatctgcctggcgttctgctgaatataatcactcttttctttttcagacagttcctgtaattcaccaattctggacacaaatgtcgagtacagataatttccatttcccattgcaagaaatgcattacattgttctaacacctgatccgccatttcatctgacaaaaacaatcctttgtctgctttttctctttcaaatgcaatgatctgttgaaaatagtctcttgtctcacttaaaacatccagatacgcttccacatctgtcctgtcataaaactgatattcagataatacaattggaatctgcgtctgtactccattgactgtattcaacggttcttcataatacagataatccgcttcttctctcaaatttctcagatattgcttcaacagatcgtatgtaattctattttttacattcagtttttcataagaaaatgcatacaatgcctgctgtatattctccactgctgtcttaatctgagtactgtctgtctgtatcgttccatatgctgtatccgctttatcaatcccatacgcttctggctcttttaatgtatagtgcagactgatctggcttgcagccacctctttgcaaaacaatttttctgtaaacgatgtaaatctttcattctccgcttctttactgctctttttttcttctaaaaatgttgcttcacaaccgtttaaaaagaaaatagaactgaaaagaatactgatactacatacaatacttacacactgcttcttccgccttttccaaaattgaatcaacatagcagactccgacagttatttctctaattttatgcatcggcttccttatttatacatctctcaaatttgtttccaaacagtaatgcatcccctctttatttgtgataaaatacaactatataagatacaggaggcgttgtgtatggccaacttaatatttgaacatttgaaaaaagtatatccgaacggattcgtatctgtagacgatgtcagcctctcgatcgaagacggtgaatttgttgtattccacggaccaagcggatgcggaaaatctacaattttacgtatgattggcggcctggaagatattacttccggaaagatctatcttgataatacctttttaaatgacattcttccacgcgaccggaagcttgccatggcatttcagaattacgctctctataagcacatgaatgtctatgataacatggcacttggactgaagcttcgtgatcttccgcgtacagttatcaatacccgcgtaaagactgctgccgcttttcttggaatttcagacattcttacgaaaaaaattcgttctatttctgattctgaacgccagcgtgttgcactcggtcgggctattgtctgccacccaaaagttctgcttgtagatgaagattttgctcatcaggatgatgaccttcggaaagatatgatccatgatattctcaaaattaacaaagagcttggaattacggttctttatgtcacaaataactacgaagaagccgtttccctgaattctcgtgtcatttttatgaaagacggaaaagtaatcgaggacagcatttaagctgtcctctcatttttcacccaagcaactctcaaaacatgcttcttatgatttttgcttctccaggtaattataaatttcacgcttctgaacgccgcggtctttcgcaacctttttcattgcttcttttcgatccactccctgagaaatatagtactccatatggtcttcaatactcatatcttcccagcgctctttttcttcctgacggatttcttcccggcttctccctgcaattacaatcacgcactctcccttcggatcattcgcctcataataagctactgctccttcaagtgttgattgaaatgctgtctcatgcctttttgtcagttctctgcaaaccgttacttttcgatctcccagacgctctgaaagaagtttcaaagtctttaccagacgatgcggtgcttcatacattacgatcgttcttgtctcagcagccatttcttttaaaacttcttcccgttctttcttatctgtcggaagaaatgcctcaaatgcaaatcttcttgtcggaagtcctgacattgtaagcgctgtaacacatgccgccggtcccggaacagaagttacgcgaatccctgtttcataacacattttcaccagttcttctcccggatcagagatcccaggtgtacctgcatctgtaatcaccgcaatatccagtccttcttccagcttctccaccagtttacgacctttatcaaacttgttatattcatgataacttgtcattggcgtctgtatttcgaaatgatttaacagtttaatactgtttcttgtatcttctgctgcgatcaaatccacctctttcaatgttctgatcgcacgaaatgtcatatcttccagattaccaattggtgttgccaccaaatataatgttcctgccatcttcatctcccacgaacaattaccgttgtctttcagtcttttcaggattatttccgttcttctgcaataaagttccatcctttgcatacataatgattggtggctctatcgtcactctgggttttgccccacgcattccttccaccagaaccattgtcggttctttatctatatacggatgaataaactgaatccgtttcggttcaatcttatattcatgcatcttcgtcaaaatctctgtcagccgaaacggtctgtgaatcatataaaatcttcctttatcctgaagaagccgcatactttctcttaaaatatcatctaatgtacacaacacctcatgccgtgcaatcgctttactgtcatctggattccgaagtccatgatccgctaacatataaggcggattcgttgtgatcacatcaaaaaaggccggcttaaatcgttctgccgcctctttaatatctccggttacaatgctaattctgtcttccagatggttatgtgcaacacttcgtcttgccatttctgcagtctcagcctgtatctcaagccctgtaaaatgctttcctttcgtctttcctgcaagtagaaccgggatgattccattcccggttcccatatcaagcacggtctctcccggctttacttttgcaaaatcagagagaaatactgcatccactccaaaacagaattttgaaggattctggatcaattctaatcctccaagctgcagatcgtccagacgttcgcctggtctcagattatttgtcatctaacttcgaagctccctctttcttctccatccgctcaagcgcagctagtttcttctgctcttctttcgatactttctgtttctttcttctcggacggaatttcagatcatccgccttatactcgcgaatctctttctcgtcattctccagattaacaataactttcacaagtctgcgaagtacactcaaagaatgtactgttccggtcaatccatcacttgttgtcacattatctccaacagaaggtaactgactgttaagcacttcataagtctcttcctcattcgtcagacaacacatcaatcttccgcagacccctgaaatctttgtcggattcagagacaggttctgttcctttgccatcttgattgataccgctgcaaactctgtcagatatgtgctgcagcataatggacgtccacagataccaattcctccgcgaatcttcgtctcatctctgaccccaatctgacgaagctcaattcttgttctgaacacagctgccagatcctttacaagttcacggaaatcaatacgtccgtccgctgtaaaataaaacaggactttattattatcgaaagtatattctgcttcaatcagtttcatatccagtccatgcttgcggatcttctcctgacaaatcttaaaagcctctttctctttctgacgattcttctctaccgtcttctcgtcttgctctgttgcaatacgaatcacagacttcaaaggctgaaccactgaatcatcgtccacctcttttggtgcactgacaacacgtccatactcgattccccgtgctgtctccacaattacgtgatccccctgtttgatttcaaactctcccggggaaaagaaataaatctttcccgctgttcggaatcttactcctattacttttgtcatgtacctaattctcctttattgtaagcaagagcagttccattgtcagttcaaaattaacatttgctttcagtctggctttcgccttttcaattgcgtccaaaatattctcaattccttcataagaactcttacttgcacgcgccttgatatatctcagctgatcagaaaatactactctgtctacattcttagttgccttataaattaatacatctctgtaccagattgcgatcatatccagatagtcgttaatctccatcttatatgtcatacattttttcactgcatccatcagttctgaaacattcatctcatcaatatttctaagtaaatgtacaacttcttccttaatctcattgaaatattctgacgtcgcaagcataatcgcttttcccatatttccctgggcaaatgctacacagacatctgctttataatctggaatctccatctgctccatcagatatttctttacaagctgatctttaatattacgaagtttcatcataacgcatctggaacgaatcgttggcagtaaagcctctgcattctctgtcagaagcatgatcaccgcatattccggtggctcctcaattgtcttaagcaatgcattctgtgcctgggcactcattaaatctgcctctggaataatataaatcttatacttgctgctgtacggcttgatcacaatatcattattaacctgtgtacgaatatcatcaacactgatcgtattcggtttctcatgtgtcaccttaataatatccggctgattaccgttctgtgcctgtttacaggactgacatttaccacatgcctctccgtcttcctcacgattctggcactgcaggctcatagcaaaaagattcgcaagaagccgctttccagatcctctttcgccattcagaatatatgcatgcgatactgcatcagcctgaactgcgctcgaaatatacttgattatgtttttgtgccctactacatctttaaaactactcatttctatcacctgccgtgtatcttatttcctctttagcggataatattctcacaattatccacctaacaatagtatattcataattttaacatcattttcttacaaaactatgaactaccatttaagtatatcataaattcacgtttatttctcgcaaaatttcttccatacaagtttccttatcaatattttgaaatctccgcttgattcccgccctttccagattctcctccgagaaatcttctgcatctgcaagaaatcttctgcacagttctgcatactgcggtttcagctgtgcctgttctctttctaacgccctcgacagtcttaatccatcttctacttctatatataatggaaccataacatcatcaccaaaatattctttcaatgcataatatgactcaattgttccgatcacaagataatcatactgccacaattcaatctgtccatcgtctgctgtaaaataagtccagattccacactttgtattgtaagaacgaaactcgatgattttctcctcgtccatcatctcatcaaatcgttcctgatctacaaagaaatattccactccgtccttctcaccctcacgcattggacgtgttgtatatggaacgattgaatgaaattttggcatcttttccatcaattctttgtaaatcgtatccttcccggaagcgcttttccccataatataaaatattttacccatactttttctcctgctcttaaacatgcatctggattcgtattctcaacttccagcctgtcggttctttattctggattccccgcaactaataaacaattctcctggcttagtccttcaatggaaaaacccatctctttatattttaccatcttttgcacaatagtagaagtaattctctctccgggaacaatcattgggattcccggtggataaagatagacatattccaatgagattcttcctgatgcctcattccatttcacactctcgccttccattctccctgcttcaaaggaagaatatgcttgttctaatggaactatttcataagaaatattttttatagtatgatcctcatcattccctgaaagctcttcgcacagaatatttttatcaatctccatcactgcctgaaccaatctgtccattccttcttgtgtatctcccggtcctgtcatagcaatcacataagacccggaagccatctccatctccaaatgataagatctcagcatttcctgaaatcgttttccattcaaaacttccccatctgtattcttaagattttttacagataatactatctttgaccggtcaaaatgttctgtctcaattaattttatattctttaactgcttcagtctctctcttgcttgctgcaaacgctcaacataagtatccatgatttcttccctgcgctcatccattgcccggacacactcatcaatggatgccattaaaatataagaaggactgctggattgaagcatatgcaaataatttcttatcctttcacgatcaacatatctcccatttatatgaagcagtgctgtctgagttaaagacggaagtgtcttatgaagactgtggatcaccacatctgcacctcgtgtattcgcattttgtggaaaataggaatgaaatccaaaatgtgcaccatgcgcttcatcgacaatcaggggaatcttatattcatgcacgatttccgctattgcttcaatatccgacacaactccttcataagtcggtgaaacaatgacaaccgcctgaatatcttcatattcttcaagcaacttttttacctggtctacatggatctcagcattaagatctgtctcttccgaaaactccggataaatatatactgggcgtaattcattcatatataccgcattgtataccgatttatgacaatttcttgccatcaagattctaccaccacgctccgtacatcccatcactgcactcaaaagtccgactgtactcccgttaaccagataatgcgtctcttccgcatgaaatactctggctgcattctcctgtaattctttcagcagttcttctgcatgatgaagatcatcaaatccatctatctccgttatatcaatattatatggtaatctggctctcatgagctccatgttacgcttatgtccaggcatatgaaatgcataataatctgaatttccatatgcagttaatttttcatataaatattccataataacctcttatttgtaaaaagaacctatctgaataatgatagattctcctggtgccatattttatttatataaagttaaaagcagtaatcataatagattactgctttctttcagtgagcgtgcggggattcgaaccccggacaacttgattaaaagtcaagtgctctaccacctgagctacacgcccttaaacactcgcagaagttataatatcataagtcttatataaatgcaagcacttttttcagattttaaatttaatatttaaatgcatctcgccacatcgctacaggcgattctaaatggcgagacacaatcttattttctcaaatcatagaactttccactcagatttttcacctttacataagaaacatgatctataaacattctcgaagtgaataccgttttcccatgatcacagaaaatttcgatgctagaacgatctaccataacccggacagtctgtttcttctctaactgttttgcataacggatcgttccaaacttctccgcatacacttctgtcatatcacttctgttcagacaatattcttccccatctgcactgaaagtcaaactgttaccgtctttatttcctatctctatagaaaatgcaccttctgtatttccttcaagctcaaaggaacattcttcaatctttgtatactctgtaatacttttttcatttgcacgaagttgctttagctcttctaccggctgttggatcaacctttcttcctcgatccgaatttctctcgggagtgttaacatgtgagcccaattattcttatctgttggatactcgctctttgaatttccaagccatccaaataagattcttcgatgtttttcatcctcatacgattgaggcgcatagaaatcaaatcccttatcaagttcatacatttctgaaaaatgaaattcttttcgttctgtatccaatggttttcctaccatgtaaactacggagaacacatttttataatcaaatttattttcacttgaaattcccattggggaacaaaacagcactcctttttgattctcttcataataatttggacattccaacatataacctaacattgcttcctgtccattctgaagtaatctcactcttccggcgtactcatatgaatctgcctgcttaccgctgtacaacatcagaattccttcatgttctttactttctgctcctgtcagcatccagtattctctatcccttttccagacatatggatcacggtaattcattgtcgtctgatccggatccatttctacaatctttttccggtctgtcagtttctcaccatcaaatctggcataacaggtacatgggatcatctcttcattttcaattcctgtatagaaaacatgtactttttctccctcttttaatgccattcctgtataacacccgtaagagtctgattctgtatccgggtacattgccacaccatgatcttcataatgaataaaatcttttgttgtcaaatgataccagtgtttcaatccatgtaccggtccagccggaaaccattggtaaaaaatatggtgtatcccattaatctcacacagcccattcggatcattcatcagaccgcatttcggtgcaatgtgccataccggataatacggatctttcctggttgtctcctgtatccgttgaaaatattcagccggcatatccgtaatccgaatatgccggttctgatgatttgaaaaatcatactgaaacataaatttactcctttatactgcttctggattcttcttcataatcagccatgtgcctgcaaatgcaactcctacagaaagcagtaatacaataatatactcaatcattcctccctgaaggtaaagcagcataccagggatcatagacgctccggttccctttgcacacaaaccaacgattgctgcaaatccaccacctacagcacctccaagacatcccatgaagaatggcttaagtcttgggaatgtaagaccatacataacaggttcggaaattccgaataatgccgggatcagagctggaatcatattagctctcttctgcttattcttctgcatcatgacaattgcaagtcctgctccaagctgtcctgcgattgctgcagatcccattgggttaatataatctacaccagtctctgtaaaaatacttacaataatcggtgttactgtatgatgcatacctacagaacagagaatctgaatcagtcctccataagcgattcctccaattccaaatggaagtttcagcatcataaggatcagatctgtcattcctttttcaattcctgaaagaaccggtcctacaacaaagagtcctgccaaaagtgaaacaagtaaagtaaggaatggtacaagcagcatgtctaagatatccggaatcacctgatgtaacttcttctccagttttgctgcaaagaatcccatgaataatgcaggaattacagaactctgataacctgtaatatttaaatgcaacggtccaaagacaaaacttaacggatcagcaactccatttaccacatcccatttatttggaagagttggtgatacaagcatcagcccaagtacaataccgaggatcggtgagccaccgaacttcttgcatgcagaccatgcaactaatactgggataaatgtgtatgctgtgtctgttaatacagaaaatactgtatcaaaagatggtgataactcaattccaaatccatttacaagaagacttcttactcccatcagaatacctgttgcaagaagtaccggaatgataggaataaaaatatcagaaatcatctttgttgtactctggaaagataatttttccttctccccattttctgttacttcagcatctccagctgtcactcctgccagtttctgaaactcagcacaaactttattcacaaatccagttccaagaatcacctgatgctggccactctttgagaaataacctgctactccctgaatctctttcatcccctcttcatcaataacagatgcatcctttacttccacgcgaagcctggttgcacaatgtgtcgcactgattacattttcttttccgccaaatgctttcagaatttcctgcgctgtctttacaggatcttttttcatctctcattacctcctatttgtgctattataacatatatcgtttttatcaaatcgattcgatacgtttgttttttatagtggccttggaatatttcctatcggccactgttatttttgtttatcgaatcgtttcgacatctgttgattataatagatcattaccatttcgctgtcaatgaattcattgaagatttctcgttttctatacttttctacaaattagagataataattttgttgaaaattaacatgtctctccatcctgaatctcgacatcaaaaatagcttttatctcctctacttgctttccctcaatctgaagaatgatcatggaaaccagtttttttgccattttctcaattggctgaacaattgaagtaagaatctccggtcccaattttgtgatataggttccatcaattgaaacaatactaagttcttccggcacttttaatttccttaattttgcttctcgcagacatgcaattgcagccatatcaacaccaaatataccatccatatcactacattcttcgaaaatacgctcagcagcatctttgtaaccctctgctgtaaatgtattatatccaatcgaaatatctacaacctcgcacccctgtttctcaagcagctcatgaaataattgttctttttcattttcgtaattctttattgtatgagaacttacaagctgtacgactttctttctattcttctctagaaaaagcgacgctgctttctctgcaacctgtctcttgtctacatgaacagtcggaatataatctgccaaataacagtcaattgttacgattggcctgtcgatcttaagatatctctccttcttcagtgaatgagctcccataatcacgccatccatagttctacgatccagcatctgtaggtaagcttcttctacatcttcacgcccagctgttccacaaaccagtgccttataccctctggaatacagttctttctctgcgtatttaataaacgtactgaaaaagggatgtgcgatatctggaacaataattcctacaattcctgatttttgcatcttcagattacggccaagctcgcttggaatataatttaattccttcattgctttttcaatttttttccttgtttcgtcagatacatatcctttattattacatacaagtgaaacagtgcttcttgatactccagctaattttgctacatctccaatgcttgccaaatcaatctctccctatcatcaaatcataaatctacagttactcttctgcattagagctctttctctaataataaaatatagaaaaaagactgcggtatacgcagtctttccgtttacatgaaataaaaatgcccagaaccggaatcgaaccagtgacacgaggattttcagtcctctgctctaccaactgagctatctgggcatagactataaaagtctgagttgcgggagcaggatttgaacctgcgaccttcgggttatgagcccgacgagcttccagactgctccatcccgcgatattaaattaatttctcaaaagagaaaagccgatgatcggactcgaaccgataacctgctgattacaaatcagctgctctgccaattgagccacatcggcttataacctttcggttaatggatggaggtggattcgaaccaccgaagcaatttgcagcagatttacagtctgtcccctttggccactcgggaatccatccatgttaagtgggacctacagggctcgaacctgtgaccctctgcttgtaaggcagatgctctcccagctgagctaagatcccacataacgacccagaagagactcgaactctcgacctccgccgtgacagggcggcgctctaaccaactgagccactgggccattcttcaatttttagaaagctatgcaccttcaaaactacatacagttaaaaccaacatcatcatccaaacctatcactgctttggttatgccctcgacctattagtaacagtcagctccatgtgttaccacacttccacctctgccctatctacctcgtcgtcttcaaggggtcttactaacttgacgttatgagatatctcatcttgaggggggcttcacgcttagatgccttcagcgtttatcccttcccggcttggctactctgctatgcctttggtaagacaacagatacaccagcggccagtccatcccggtcctctcgtactaaggacagctcctctcaaatatcttacgcccacgccggatagggaccgaactgtctcacgacgttctgaacccagctcgcgtaccgctttaatgggcgaacagcccaacccttgggacctacttcagccccaggatgcgatgagccgacatcgaggtgctcaaaccactccgtcgatgtgaactcttgggagtgataagcctgttatccccagggtagcttttatccgttgagcgatggcaatcccactttataccaccggatcactaagtcctactttcgtacctgctccacccgtcggtgtcgcagtcaagctcccttctgcctttgcactcttcgaatggtttccaaccattctgagggaacctttgagcgcctccgataccctttcggaggcgaccgccccagtcaaactccccacctgacattgtcccccagccggatcacggctgctggttagaaacccagtactgcaagggtggtatcccaacagcggctccatggcaactggcgttaccacttcttagcctcccacctatcctgtacatgcaataccgaatcccagtatcaagctggagtaaagctccatggggtctttccgtcctggcgcaggtaaccagcatcttcactggtatttcaatttcaccgggtgcattgttgagacagtgcccaaatcattacgcctttcgtgcgggtcggaacttacccgacaaggaatttcgctaccttaggaccgttatagttacggccgccgtttactggggcttaagttcaaagcttcgcttgcgctaacctctccccttaacgcttccagcaccgggcaggcgtcagcccatatacctcacctttcggttttgcatagacctgtgtttttgctaaacagttgcttgggccaattctctgcggccatcttactggcactccttctcccgaagttacggagtcattttgccgagttccttaacaatgcttctcccgtcggccttaggattctctcctcatccacctgtgtcggtttacggtacgggtatcctgcaaacaatagcggcttttcttgacagtcagctcacgtgcttccctacttattttcagtccacatcacgtcttcggattgcctggcggatttgccaaccagactcctacctcgcttgtaccggtctttccattcccggctcacgctctctgcctgtgtccccacagttctgttacaggatagtacaggaatttcaacctgttatccatcgactacgtctttcgacctcgccttaggccccgacttacccagagcagatcagctttactctggaaaccttagatattcggccggaaggattcccaccttcctctcgctactcattccggcattctctcttcttaaaagtccacagctccttacggtactgcttcgtccctttaagaatgctcctctaccaattgaattaattcaattccaaagcttcggcagtgtgttttagccccggacattttcggcgcaggacctctcgactagtgagctattacgcactctttgaatgaatggctgcttctgagccaacatcctagttgtcttcgaaatcccacatccttttccacttaacacacattttggggccttagctgttggtctgggctctttcccttttgaccacccaacttatctcggatcgtctgactcccatacatcatctacacggcattcggagtttgatatcccttagtaagctttgacgcccccttaggaattcagtgctctacctccgcaagactcgtatgaggctagccctaaagctatttcgaggagaaccagctatctccgggttcgattggaatttctcccctatccacacctcatccccacccttttcaacggatgtgggttcggtcctccattgccttttacggcaacttcaacctggacatggatagatcacccggtttcgggtctactccgactgactatgcgccctattcagacttggtttcccttcggctccggaccttcagtccttaacctcgccagccagcgtaactcgccggaccgttctacaaaaagtacgcggtcgagcatataaagctcttccacagcttgtaaacatatggtttcaggttctttttcactcccctcccggggtccttttcacctttccttcacagtactatgcgctatcggtcactaagtagtatttagccttacggggtggtccccgcatcttcccacaaggttccacgtgtctcgtggtactctggatcccgccatgtcaactcgtctttcgcttacggggctttcaccctctctggccggctttcccaaaaccgttctgctaaactcgttgaatcaattccgcggtccgaaccccagcatgcacgcatgctggtttgggctcttccgttttcgctcgccgctactcacagaatcacatgttgttttctcttcctccggctacttagatgtttcagttcaccgggttcccttccttaagttatgtattggcttaaggatacttgaggtttgctcaagtaggtttccccattcagaaacctccggatcaaaggatatttgctcctccccgaagcttttcgcagcttatcacgtctttcatcggctcttagtgccaaggcatccaccatacgctcttatcagcataaccaactcgacctcatcccacgggaatgggataacgtccacacatacatagcgttgtatgcgttggtgatagtcaatttgtttttagtctgttttcttcagactgtaagttaatgttgttaacattacctcggatgtcttgattagatatttatctaaatctattgatttttactatatgcagttttcaaggtacataactggtttctttcgaaaccaagtggagaatacgagagtcgaactcgtgacctcctgcttgcaaggcaggcgctctcccaactgagctaatcccccatagtatgggcttaagtggactcgaaccaccgacctcacgcttatcaggcgtgcgctctaaccagctgagctataagcccatattcttttgtaatttggcggccacctactctcccacaccgtctccagtgcagtaccatcggccgcttaggtctttaccatcgtgttcgggatgggaacgggtgttacccctaagcgcatcgccaccaaaagctttaggttacttgataacccaacaatagacaacagtaaaacgctttacttctttcttccttagaaaggaggtgatccagccgcaccttccgatacggctaccttgttacgacttcaccccagttatcggtcccaccttcggcagctccctccttacggttgggtcactgacttcgggcgttaccgactcccatggtgtgacgggcggtgtgtacaagacccgggaacgtattcaccgcgacattctgattcgcgattactagcgattccagcttcatgtagtcgagttgcagactacaatccgaactgagacgttatttttgggatttgctcgacctcgcggttctgcctccctttgtttacgccattgtagcacgtgtgtagccctgctcataaggggcatgatgatttgacgtcatccccaccttcctccaggttatccctggcagtctctctagagtgcccggccgaaccgctggctactaaagataggggttgcgctcgttgcgggacttaacccaacatctcacgacacgagctgacgacaaccatgcaccacctgtcttccctgtcccggaaggaaaggcaacattacttgccggtcagggagatgtcaagagcaggtaaggttcttcgcgttgcttcgaattaaaccacatgctccaccgcttgtgcgggtccccgtcaattcctttgagtttcattcttgcgaacgtactccccaggtggactacttattgcgtttgctgcggcaccgaacagctttgctgcccgacacctagtagtcatcgtttacggcgtggactaccagggtatctaatcctgtttgctccccacgctttcgagcctcaacgtcagttaccgtccagtaagccgccttcgccactggtgttcctcctaatatctacgcatttcaccgctacactaggaattccgcttacctctccggtactctagattgacagtttccaatgcagtcccggggttgagccccgggttttcacatcagacttgccactccgtctacgctccctttacacccagtaaatccggataacgcttgcaccatacgtattaccgcggctgctggcacgtatttagccggtgcttcttagccaggtaccgtcattttcttccctgctgatagagctttacataccgaaatacttcatcgctcacgcggcgtcgctgcatcagggtttcccccattgtgcaatattccccactgctgcctcccgtaggagtttgggccgtgtctcagtcccaatgtggccggtcaccctctcaggtcggctactgatcgtcggcttggtaggccgttaccccaccaactacctaatcagacgcgggtccatctcataccaccggagtttttacccctgtaccatgcggtactgtggtcttatgcggtattagcagtcatttctaactgttatccccctgtatgaggcaggttacccacgcgttactcacccgtccgccactcagtcaccaagatcttcatccgaagaatcaaatcaaggtgcttcgttcgacttgcatgtgttaagcacgccgccagcgttcatcctgagccaggatcaaactctcgttaaaagtgtttgtatccagttcagaaccaactaactagctaattcttccctttttactgttgttttggtttgtttgaaaaccgttcttaaaaatcttctcttaaagaaattttcaagggttgttgttgtctattgttcagttatcaaggttcttacttcgctttgttcattcgcgacagctcatttattttatcataagcatttcgctttgtcaagaacttttttgaagttttttattttttcacttcttcgctttgtttcagcgaatcagctcatttatattatcatgtattttttagaaagtcaagaacttttttgaagttttttattttctttttacatgatttttaactttcttcaaaatcaggagaagtcgccagacttctgtcgtcccgctcttttgatttaagttaaacggagaaagagggatttgaaccctcgcgccggtcgcccgacctacacccttagcaggggcgcctcttcagcctcttgagtatttctccgtacactgaattctactatagaatctatagctttgttcaattgtgtgcaccaacagtgcgaaatttattatagcaatacactgtcatcttgtcaatcactttttttcattttttaacaaaattttaaactatctgttctacgcagcttttcagcttcgcagttgctgtctcaatatccttttgggcaaagattgcactgatcactgcaacaccattaattccactacccgaaagctcttttacattatcttgtgtaattcctcctatagcaacaaccggaatatcaactttagtacagatttccttcaacacactgtgttctacttcccgtgcgtctgtttttgttcctgtttgaaacaccgctccaacccccagataatctgccccgtgcttttcggctaataaagcctgctctactgtccgtgcagagacgcctatgattttatcttctcccagctgcgctcttacatcaagcgcttccatatcgctttgcccaacatgcactccatccgcatcaatttccttcgcaagcttcacattatcattaattatgaatggaactctatattttttgcataactgttgtatcttttttgcctcttctaaaaactcttcttctgtcaaatctttttcacgtaactgaataaaggtagcgccacctttcagcgcttcctcaacctgttcataaagcgtctgcccattcagccaatgtctgtccgtaacagcatacagcaacatctgttcccttaattgttccttagtaaagctcatacttagcccctttctccagtttttctcctgtcatattatagatgacatcaataattctatttctatatgtagcgttaccatcgccttcctgcattctcgtccatgctatttcaccggcaacgcccatcatacaaactgctgccacagcagcttccagttttcttttcggatttgctgccagaaaagcggtcgtaataccggataactgacatcccgtgccagttattcttcccatttctgaacgtccatttctaattacataacatttctcgccatctgtcacaagatctattgctcctgtaattataacaattgcttctttctttttcgcaaaccctttaataaatgatatgctctgttgcaaatttctttcattaacggcttctgtaagatcagcatctacaccttttgtacttccgcttccataagccagcgtcttaatttctgaaacattacctcgaatcacagaaaactttatctcttttattaattttaatgccgtctccgtcctgaacctgcttgctcctgctcccaccggatccaataataccggatgtcccagttcattagagcgatgcccggctttaagcatcccctcaatactcgttttatgtaatgttcccaaattaatgttcagccctccacatatagatgtaatgtccgctacatcttccggctcatctgacataattggactgccaccacatgcaagaatcacattcgcaacatcattcactgttacataatttgttatgttatgcaccacaggggctgtttttctaacttgatccaagcattcctttagcatttctcttctaccttttctttcgtcaggttcttattgattgtttcctggatctgctgttctactgcagcagcaatttccacagtcttcatatctttataatcttcataaagcatcggtttcagaaaatgcacctgcaccgtcaccggtcgggtactgtttgtatcaaacggtttaaaagaatcaacaagtgctactggaataatcggacactttgctttggttgctgctttaaagcttccccctttaaaagaaccgacattatttccattttttgaacgcgttccttctgggaagataagataatttctccctgatacaacttcttttgttacacttgtaatggttttcattgcctgacggacatcctcacgatcaatcataaatgctttcatgattttaaatacctgttttaaaaacggaacgttttccacttcttttttagctacaacagaaaaagggtgcgtacacgcttcaacaattgccaatacatcatacaagccttgatgatttggaaaaaacataaatccgtcctgctttggaatattctcctgcccatgtacatcgattgttacatttccgcctttatttgcacgaaaaacaatccagcgcaaaaattcataattatcttcttctgtatatttatccacatgggaagcccgatagcagagtttaatccatccccccggcacgatcaaaagattccgcaataccatcagtagaattcttctcatgcattctcctccatcctgcaataatccttaattgctgtttcataaagattattcccgtctttatctattactacaataaccggaaaattttcaactgtcagttttctgatcgcttctgtcccaagatcgtcatacgctaccacttctgaagatgtgatacattttgaaagaagcgccccagctccaccaacagccgcaaaatatactgaaccattgcgtacaattgcatcaattaccgcctgatttctttttccttttcctatcatagcgccaagtccaaggtccaggagctgaggtgcgtatttatccattctgcttgctgtcgtcggtcctgccgagccaattgggcgtccttctcttgccggtgatggtcccatgtaataaatcacctgaccttgaatatcaattggaagttccccaccttcctgtaaaatctcatacattcttttatgcgccgcatctcttgctgtatagaccgttcctgtaagataaacatagtctcctgccttcagtgttgccacggtctctttcttcattggtactgttatatgcttgtccattttactttcctctttcacttagcttgttgaattaaattgtacggatcacatgacgatttacatgacagcaaatattaaccgccaccggaagtcccgcgatatgtgttggataagtattaatattcaccgcaagtgctgttgttgtccctccaagtccaccaggtccgataccaaggctatttatttttgtaaggagctcttcttccaactcttttacgtattcaatttctgaatgtgatccaacttcacgtgtcagagcttctttggccatcaaagcacatttttcaaatgtaccaccaattccaacaccaaccaccattggcgggcatgcattcggtccggcatcttttaccgctgtaagaaccgcatcttttacaccttcgattccttctgccggtttcaacataaatacacgactcatattctcgcttccgaaacctttcggtgctacttttatctttacctggtctccatctacaattcttgtatacagaactgccggagtgttatcctttgtattctcacggatcaacggatctccaacaactgatttacgaagataaccttctacatagccttgacgtaccccttcatttaccgcatcttccaatgctcctccttcaagatgaacatcctgtccaatctcaagaaatactactgccattcctgtatcctgacaaatcggaatcatatcctctcctgcaatcttcaaattctcttgcagctgttccaatatctgttttccaagtggtgcttcctcattcttttcggcacatttcattgcctctgccatatctggtgacagaaaatgatttgcttcaatgcacatttctttgatgttttttgttatttcttctacacgtattgtccgaatcatttcttctatctccctcttctttgaaacaggtacgcaagcgcaatgcaagcgtacctgtattttttatatctcaaattcaatttttctgcctgttcgatggtactggtgatatctcactcctgctgcatccatcattcgttttgatgctttcactcccgttgtatccgcgtatttgtcacaatcataaataacttctttaattcctgcctgaataattgcttttgcgcattcattgcatggaaaaagagatacgtaaagttttgctcccgcaagacttccgccattgtaattcaaaattgcattcaattcactatgtgttgtatatacatattttgtctctaacggatcttcgccttcgcgcgcccatgggaattcatcatcagaacatcccatcggaagaccattatatcccatggaaagaatcttgttatcctgacttacgatacaacaaccaacctgtgtattcggatcttttgatcgcattccggaaagcattgccacacccataaaatattcatcccatgataaataatctgttcttttatctgacattattcttctccttttgcatatgaattcagtttgtctgcaagtttatctataagccctgtgagtatctcaaagcattctccatacgctgtcagaggctttccataaggatttggaagttcttctgatactccaacaaattcatttattgtatatacattttttacattttcataatccgaaagaactttgttcttaattgtctcattcaatgtcaatacaagtgtatctccttgtagattactgccatcaaactgctttgacacatgattttccaacgtcatctgagcgctcttcataattgcctctgccttctggtttaccggttcagggaaaagcacaaccagtccgccggattcaataatatactcttgctcaagatcctggtgacatagtaattctgccgccattggtcctactgccgaatccgcctcgctgacaaaaatcactctgcgatacttctgcttctttgtgatctctgttgcctgcaggtgcatatgtcctgccgccttttcaagacgattcataattgcctttcctattccgttcatagcaaaagattcactataaatcagatcaacgtcttcttcatcaaattcgcgaagcacacgatagaggtttcttgcaatggtattctcattctcacgggttcatatattcttcacaatcccataattatagaactgaactgtttcccccgttgcaatgattccgacttcctttccttccctgtgcgcggcataggcaagctgacgaattgcaagaatctcttctcttatatttccttccacaatcatcattttcgcctttggtgcataatgtcggtacttcattcccggagcttttggcgcctgcttgctttcactgttaaccaatgtctcatcaacactgaccggtccaattacctcttcaaacatatccgctgtaattgcacccgggcgtaaaatcatcggcggctctaccgtcatgtcaagaattgtggattccagtccgatatctaccgcacctccatccaggatcatatcaatcttaccttccagatccacccgcacatgctctgctgttgtcggactcggacgtccggatgtattcgcactcggtgctgaaacaaatccacctgccgcccggatcaatgccgctgcaattggatcacttggcatacgaactgcaaccgtatctaatcctccggttgtcccataaggtacactctcacttttttcaaatatcatcgtcagcggacctggccaaaaatgtgctgccagtgcgtctgtctccggtggaatattcaccgccacttttttcaggtcctcatagtctgcaatatgaacaatcaacggattatctgatggacgtccttttgctgcatatgttttctttgccgcctcctcttttaatgcgtccgccccaagtccgtaaaccgtctccgtaggaaatgcaacaagacctccttgttttaatacatttcccgcttcttctattacatcctggtttatttggtttttatctatttttctaataatcgtttccataaattttattatatcattatttgttctaaaaaaaaactgtttctcttctgctattcattttcttttatataagataaaattccttctgccactgcttctgctactgatttctgataatcttccgtaaccagcttctgtgcttctttatagttactcaaaaaaccacattctacgatcactgtaggtacttccgtcttttttaatatataatatgtattatttgcttttatctttttggtattatccggatttaccttttgtaaagcgtcttgtattatccctgcagccttttctccttccgtcgatgtctgatagtagaagacctgcgcaccgaaaacattttcttcatgataactgttctgatgtatactgactgctaatacaggagaaacttcattcataatctttactctgtatttcaaatcttctactttactttgtgcaagctgttcatctgtttctctggtcatgattacctgtatattttctttttccaaaattttctttacagaattcgtaatcgttaaattgatatctttttctttcactccattgattccgaccttccccgaatcagtaccaccatgtcctgcatctaaaacaactatcctgtctgacttttctgcttctccgattgtctccatttcttcttttaattctttctgtaagtttttcgaaactttccaacaacctgcgataagccctgtcataatcagaatccctatcatcaacctgatttttctttgcaaaaaaacgacctcccttcacatattctatctatatgcaatgagaagccgttttttaacttatcttttatttaatttacatactgagaaatgagcttccatacactgctttcttctcttcccaggctccattctgccacacctgccagtttatttccctgtatcaccttcagctttgcttccaatgattgagcatcttcaagccagatacggtaggttccgccatccgcagaccattttgcatagttttgctgtgtcttttcatcccactgtgctgttgctcccgcattcacaacactctgcgccgcttcttccattcccagtgccttacttgatactttattcggataagatgctgcttctgtaccagcttcttccgaaagttgctccgggctctttgctgtctcaaaccataatctggtaaaaaatggaattccggcaattactttatcagctgatacctttttcaatgttttttctattccatcctgcaaatagctgatcgatgccactgatcccgcttcataggatccttctgtatgttcatcataagccataatcaccacgtaatctgccacaatcccctgctctttaagatcataatgtgaattgtatgactgtggcacataattatcaactgaaaatacaagattattctggtggcacttcacagacagctctctcacaagctgcacgtaatgcacaccacacttggaagaaatcaattcaaagtctaaattaattccatccactcctgctgccactgccgcagctacaacctgatcttccagttttgctctttttgatgtataacgcaatgtctcataggtctcatcataggaattcgttccaccatgaaaatcccggaatacagcccacacttccagtcctgccgtatgtgcataattcacatagtccgcatctgcaattgaactgatattaccttccgtatccgcaagactaaaccaggttggtgcgatcgtcgtaagtccactggttgatgcaagtacctgctgaaccgcattattcgctgccgcattcgtcacattatgccatgccatattgatcgaatgatcttctgtcatgtctgaataaaccggttccgtaaaatctctggatgttttttcttttttctggttctttaaagatttggtcttaatatatcctacataaccatccgctgtggcaactttcatccagtcatcttcgtcttcaagcactgtcaccttgtccgattttttaacttctgtcagtatcggactcttaacgccaccaagataacgaacctgtgtgtctttcttcacttctgctgtctcgatctcgccccactttgatgtgataattgctctgtttggttcctgttccacagaatattccatattcgtatactcttgtatgaacggaagtgcgatatatgcgatatctccatccgtcttaagaattacataatcttcactttttgtttcgttcactgctgtatattcgctgctgttctcacttacagaaacatttccatccggcaaggtatataaaagcacccgttcgttcgcatcccagtaaaatctgctgtttatcttatcacgaagaacctgatatgctacataatattgtccatcaaaaaccttacccggtataacactatctgtagaagaatcggaagaagatttcgcggaactctcttcttttttcactacttcattattaatgatcaatgccagatcatcactgttttctattccataatattgttctttatcggctttctcatttgatgaaccgtatctcttaaagaaaactgcgcctgctgccaaaatcatgatcaataatatgatgatcattatgaaaagaattttattacgtcttttccgcgctctattcactttctttgcatgacgtgttcccgaccttccatttctgcctctgcctgttgtcattggtcttccatttctccgggaactccccggatgtccagattgtccttttactcttcccctgcttcgcgcatgggtactgccttttcttttgtccatgccaaccctcctgattgcaatttttatatctctggcgctctcctacacaaacagttccttacttcctgccctgctgtgtgtatttctaatatctccacatctctggataaaataatgattctgaaattcattatatcatattttcatcttgcgtcattaacaaattgcatctacaacagttgtacatatcaaaaagttgttacaccttcaatgtctgtccatcttctatcaattataacagcttacaaatatacttctgtccggcagttcaaggggtaatctctgcctgtctgttatgattcacatctgtaaaaaccaatgattctatccttccttccggatcaatcacataatctctcatataagtaccttcttctctggccatatatgctgtcacaatctgcaatggactcatcggatatccatccataactatgtccactcctttttcttcataacctcttagctccgcatataattccttatatccatcttccgttctcatatcgtatgtactccttctctcctgggatcctgataaaacgttgtccgccatcttcgaccataaagggtatctgtgacatactgtagaacaagtgacggacaagaagacaaccctgatcttcggagggtctccttctcataattattgtgaattttcccttgatttcagggaattgaatttttttgaaaatcagaaatgctttcagtgcctcctttcttaacattccgttttatcaaatggtgtgtcttctgtaagtgccattatatgagcagcctttcggaatttcaatgtgtttattgttgataagtgggtgggatttgttgataacctaaaatagttataaacaattttcgttttcctttacatcttttctttttttgtttatactaaacgatgaaaagatatatctagttatgaacataatgaacagttcttaatccacagattatcttaatatcataagacataaggatgtgatcatatgaaaattgaaaaaatcaatgacaatcagattcgttgtactttgacacatgccgatcttgcagcccgcaatctcaagatcagcgaactggcttatggtaccgagaaagcaaaatcactatttcgagatatgatgcagcaggcatctttcgactttggattcgagacagatgaccttcctctgatgatagaagcaattccttcttcttcagactctatcactttgatcataacaaaggtggaggatccggaagaacttgatacacgtttttccaagtttacacctgccggagattctgatacactgaacagcaatgttcttgaaaagcttcaaggcgcagatgaattctttgatctgcttaacaaagtgaaggaagtggcttccgaagcaaaagatccggaacctaaagaaacagtaccggtatttcctgtccgcctgttctccttcgacacgttagattctgtaattgaggcttcccgcctgcttgctccgttctatacaggtgcaaatacactatataaggacgatgagaataataatacctttatccttgcgctggcacctgctgatggtgcagatcaggaatttaataaagtatgtaatatgctttcggagtacagttcccctgagaagggagattcttctgttcttgcatttctggaggagcattgcaaaatcattgtttccgcagacgcaattcagaagttatccacaatttaaacaacgaataaaaaagacggtctggaattatgggaataacttttcccacacttcagaccgtctttttcacttgttatccacaaaaacttttaacgatactaaaaagctgccatactctcttttttgagagcacaacagcttcttgtatatcttttctctttattatttaccagcggctgccattgctgcattgatcttctctacaagcagatctgcatcaattccatgaaccatagctgcttcctcaagagactccatctgagatgacgggcatccaagacaatgcataccaatctccatcaaaatcggagctgactctggaaatgttaccagaagttcgccaattgttgtgcttttagaaattgccatcactgtttcctccttacatatttctattttcaattaatttctgtcaccattgaacagtaatttttattataatccctgatctatgatttagcaaccttattttcattatcattctatgaaattttctgaatttttcacgcaactttttccgtttatcacactactcaaaagtcaatcagttttctttttttttttcgacaaatcgtcattttcataacaatagccaaaacgaatgttctttttatttccaaaagttatccacactattcacatctttctttgttgataatgtggataactttcagggaatcttttatttttcctcattttttcgatttttcaatgttgataagttgaaaactacttttttttatttttttgctattttgaatattcttgtcatattttgtgcattttgactatccgtatatttttcttggaaaatatcgattttagaatttacagtcaaatctttcatttcccacacatattctggacaatgcattgttttctttctattattctttaataaatccgtctgacagccacgatatttgtatacgttgcactgctgataccaattccctgagcttcattcattgcatttacgatctgatcatttcctatatataaaccaacatgtccttcatataagataagatcccccggctgtgcgtcttcataactcacttcatatcctgcacttcgctgttcataagaagttcgtggaagacttataccaaaatgtgcatacacggactggacaaatccagaacaatctgctccatctgttaaacttgtaccgccccacacatatggattcccaataaactgacaggcataatcaataacttcctgccctgacgcaactgactgagccgccgcttctgcagcctgggcttctgcttctgcctccgcagccgcagcttcttctgcttccattcgtttttgttcttcctcttttgtctccccgtaagaataagaactttcctctataacataatcaccgcacacccagccattaacttcaccgacctgtatcggataccagccatctacaggatctgctgtcacaagatattcttctccctgaccgatctgggttaatacggtagtatctgtcccatgtccttttctgacattcagacaatctgctgtgactgtaacattctcatttgtatactcatctgacctcgaacgggcttcttctcctgtgaacaatgtttcggtcggaacatacccctctgcatttcccgaccgaatctttgtccatccatccaaatattccaacacaactgccgctgaatcagaatataattttccaacccattcactgttttcatctgcttcgcttctaatataggtataatcccccgtattagaaaacgctatattcaaatactctccctcttctgtcggcaccagatacagattgatattgttctttatttctgtctgatatgatgcttccaaaatgttttcaattcctgtaaccggaaccagactcttctcactgtcatcagtttctgccgcctgtgttctgactacactccccggaattatgatcatccctgccatcattgacatgataagcttatgcttcatccgcatgttactcatataaaacctcctttatttccagccttatcttttgtgggaagttttaattgttacataattgttaatttttgttacgccgtaattttatcaatcaaccatagatatgtcaactgttttaatagttttttcataattatcgccctccaccatttgtaattattccccttttttattaatctcaacgtccattttgttaattattttgtaatattttgtcaggagaaataaaaaaaacttatttttttctattgacaatttttaaaatataagttatattctaattgcagtaatcgttactgttattgattcaatttcagaaagaggtgaatctatggctgcaattaaatatagccgacagcgagaagctatcaagcattatctcgcttcaacaaaagagcatcccactgccgacactgtttatctgcatgttaaagaggattttcctaatatcagtcttggtactgtttaccggaatttgaatctgctgacagatatcggcgaagcgatcaagatcccaacacctgacggcggagatcgatttgacggaaatgttattccgcacaatcattttctctgtacaagctgtggacggttactggatctggaactggatatgaagagtattgaagaagtgaaccggctggccggggagaattttgatggaatcatcacttcaagttccactttgttttatggggaatgcagtgactgcattagaaagtcttaagttataaaaaaaattaataagaaaaaggagattatcattatgaaaaaatttgtatgtacagtatgtggttatgttcacgaaggagatgctgcaccggctgaatgtccagtctgtcacgcaccagcttctaagttcaaagagcaggaaggagacaaagtatgggctgctgaacacgttgtaggtgttgcacagggtgtcagcgaagatattcttgcagatcttcgtgcaaacttcgcaggagagtgctctgaagtaggaatgtaccttgcaatggcaagagttgctcacagagaaggatatccggaaatcggactttactgggaaaaagctgcttacgaagaagcagagcatgctgcaaaattcgctgaacttcttggtgaagttgtaacagacagcacaaagaaaaaccttgagatgagagttgatgctgagcacggtgctacagaaggtaaattcgatcttgcaaagagagcgaaagctgctaacctggatgcaatccacgacacagtacacgagatggctcgcgatgaagcaagacacggaaaagcattcgaaggactgcttaagagatacttcggctaaacaaaccttatcagcagatgcgattgcttctgctgtgataaacctgcccatcgggaaatgttacattcccgatgggcaggttttttaatcttctttctcttttctttcatctgataatttaacttttttgccggcaatgagttcctgtttctcttttctccctaactgcttaattgcatattcccgcttcattgcctgttcttttgtctcaaattcctcataataagccaattcaactggcctgcgtgccttcgtatatttcgcacctttcccggaattgtgcgcctccacacgtttttccagatcatttgtccagcccgtgtataacgttccgtcactacattttagcatatatgtataattcaaaaactcacctctgctatctcccgcattactctttcgatgcttgctatttattatatcatgaatctcttatccaagaccaaaactatgatgtaagtggcaaaatttacttttgacactcacatcatagtatattatcaagaaaacttttcctgtatccgatgttactgttcacacgatgtgcgaccagcaacgcatctcgccattttaaatcgcctttggcgatggagcgagatgcattcaagtcaaaacacgcatcctccgtgtcaatcagcggagtgattgacacgggagtgaacagtaactatcccatacaatatagtattgatcctgcacccgtaatcaaacttttgattccttcattttatccaaacaaatacaactttactccataaaattcattgggtcaaccggcgccccgtctttcataatttcaaaatataaatttggtccttcgacactataatatttcgtcggtgaattcagtgttcccacttcctctccggctgcaatataatctccaactgctgccgccacttcatccagttggccataaaccgcagtatacccatttcccatatcaagtgtcacggtagttcctgtctgggcagtctgttcaatactctctacaactcctgctgccgctgcgtggattacttctccctgcgttccaccaataatcagtgcaggattatatttatactgctccaatgttggaaaatatactgtatgatccatactaaaactcaaaagtgttgctccgcttgccggccaggcaagtgtactttcctgagtaaaccacacattctgtgtatttgaagatgccgtgctttgaatttcctctgtggatgtatttccattctccatactgttttcattctcttgctgaacatccttttgggattcctggttttctgcattatcctcttctgaatctgtgtctgtaggaagaatatcatctgtattcgccaatgtactatcatcttctgtaagctgttctgctgttgtttgcgcatctttgatctgctgctccatatcttttttgtaatgattgtatgtgtagctcccaaccattgtaattaccgcaacaaaacaaagtactgcgccaactgcagctccctttcctttcaaaaaggccggtctttcatttttattcataatcatcacctctggctatagcattgcctgaaatgatcgatcttattcatctatgtggtgtagttctgttccttcataaaaatattgcaggatctcttcataatttttcccatcctttgccatttcctgtgcagtccactgactcattccgaatccgtgcccttttccaaccgttgcaatcttcaacccgtgtggactttcataaaaagaaaatgaactcgaaggaagtttcagtgcatcacggaactgatctcctgtacatatcgtctctccaatcctcatttttcggacataaccggaagaatcccattcctgaatttcaaaatcttcatatccataaccattttccgcttttttctgttcctctgccacaaggaattctctacatctcttttgtatctctttatattctatcaaatgtacctgaatttcatcttctgccgccttgtcaagcggacattcttttgctgtgatgtacggataatctgcattcccaagtacctcctgcacgtctctggtctttccattactggattgatgaaacggtgcccatgcaaaggtctcatgataccacaatacaattccttttgtttcctgtgctgcctgttgacattttttcaaattctcttcgtattttggcccccactttttcttcatctgagtctgcgtcagacatttatccaaaatagtttgcttttctttctctgttctgtacaactctgtacgtagaacaaccgcctgtgccttcaatgcttctatttcatatcctccatctgtttctcctgcgagtattcctgcgagatacacagatgcattatcgctgtcagctccctgcaccgcattctttccgtttataaaaacagaaatgatgtaaggaagtaaaaacagtatgataagaaatgcaaaaaataactttattttatttctaattgtatcacgcataaaaacagccctccatactctattgtatggaaggctgtcctattttagaacttatctggtttcattctccgtgtaattgcttattcgaaaaggtcctgtcctgatggaacttcaaccttctccagatgccagatatcacgaacatactcttcgattgttctgtcagatgtgaacttaccgctgcatgctgtgttcatcattgccatcttagaccatctctgctgatctctataagcttcttctactctcttctgtgcatctgcataagaacggaagtctttcagaatgaagtaagtatctgctttgtctgtacactgtgtattcagcagtgagttatacagattgatatacatgttgtgatcgccgttagaatatgttccatccatcagctgatctacgacacgtttgatctcccaatcattaaagtaaacatctgttgggttgtaaccgccattgttctcgtaattgattacttcctgtgaactcagaccgaagataaatgcattctcttctccgacttcatgaacgatctctacatttgctccgtccattgttccgagtgtcggtgcaccgttcaacatgaacttcatgttacctgtaccggatgcctctttggaagctgttgaaatctgttcgctgacatctgccgctgcgaaaagaatctctgcattggatactctgtagtcttcgataaatacaactttcagctttccgttgatgcttctgtcgttatttacaacatctgctacggagttgatcagtttgattgtctctttcgcacgaaggtatcctgctgctgcctttgctccgaagataaatgttcttgggtagaaggacatctccggatgctctttgatctgattgtacaaatacatgatatgcaggatatttaacagctgacgtttgtactcatgcagacgttttacctgaatgtcaaagatagagcgaggatctacatcgattccgttatgctctttgatatatttcgcaaggcgaactttattctggtatttaatttccataaattcacgtcttgcgtcttcgtcttcaacaagtggtttcagctttgcaatctgagacagatctgtgatccatccatcaccgatcttatctgtgatccaatccgcaagaagtgggtttccatgtgcgaggaaacgtctctgtgtgattccatttgtcttattgttgaatttctcaggcatcatctgatagaaatctttcagttcctgtttctcaaggatctctgtatgaagctgtgcaacaccatttacagagaatcctgcaacgattgccatgttagccatacgaacctgtccgttcataaggattgccattttgcggactttctcttcatttcccggatacatttcgcgaaccttaatcaggaaacgacgatcgatctcctgtacaatctggtaaatacgtggaagcagtttagagaacaggtcgattggccatttctcaagtgcctctgccatgattgtatggtttgtataagcacaagtcttacttgtaacttcccatgcatcctcccagcttaatccttctacgtcgatgaggagacgcattaattctggaactgcaactgtcgggtgagtatcgttcatctggataacaaccttctcatgcagttttctgatatcaccatgttttttcttatacttctcgatcagagcctgaagacttgcagaaataaagaaatactgctgtttcagacgaagctcttttcctgagtaatggttatcgttcggatagagaacatcaacgatcagttttgcaaggttttcctgctctactgctttgtgataatttcctctgtcaaattcatcaagtttaaagtctgtgatcggttttgcatcccatacacgcagtgtatttactacgtgattgccatatccaacgattggcatatcatacggaactgccatgacagactcatagttttcctggataaatttatcttttcctgtaacaggatctttctcgaaacggatatttccgccaaaacgtacttcttttgcgtactcttcacggcgaatctcaaacggatttccttctttcagccagttgtccggaacctctacctgatatccatctttgattttctgtttgaacattccgtaacgataacggattccacatccatatgccgggtaattcagtgtagcgagagaatcaaggaaacatgctgcaagacgtccaagacctccattaccaagagccgcatccggctcctggtcttcaatcacgttcagatcaatattcatctcttccagtgcttcttttacttctttatatgctgtcatattgatgaggttgttgccaagtgcacgtcccataaggaactccattgacatatagtatactgtcttagcgtctgtctcatcatatcttttttgtgtctcaatccaatcatcgataatcacatctttgactgcataggatactgcctggaataactgctgcggcgtagcctcatcgattgtctttctgtaaagtgtcttaacgttatcctttactgccgctttaaacgcttttttctcgaatcttttactgaacatgtttattactctccttttttctcaacacccattgtaactgcttcgccgttgatcttccattctttcacgtaaccatccggctgtgcttttacaacttcatcagcaagtacctcacctgcgatcagtgtgttgttcttttcgaagacagcttctgccttttcactaccctcgtatgtaactttgattctgtccataacttcgaaatcagcttcttttctcattgtctggatcttgctgatgatctcacgtacaaatccctcttccagcagctctggtgacaggtttgtatcgagaacaactgtgattccgttgtcatttacagattcatatccttcaatctgtgctgtatcaatcagaagatcttccttgaaaagttcaatttcctgtccgtttacatccagtttgagtgcacctgtagcgttgagctcatccattgctgcatttccatcgatgtcgttaagcgccgctttgataccacctaacatcttaccatatttcggtccgactgtctttaattgtggtttaaaactataagaagtaaagtctcttacatcatctgtgaatttaacatttttaacattcagctcgtctgcaacgatctcctgatagaattccggaagatcaaaatctgctttcacaaacatctttccgattggctgacggttcttgatgttggatgcattacggcatgcacgtcccataacaacaaggtcaagaacatgttccatgttattttcaagttctttatcaatctgttcttcatgaacttccgggaagtcacaaaggtgaatactttccggagcatccttatcaatgctacgaaccaggttctgataaatctcttctgtcatgaacgggatcatcggagctgctgccttagatactgtaacaagagctgtgtacagagtcatgtaagcattgatcttatcctgctccattccctttgcccagaaacgctcacggcttcttcttacataccagttactcagatcatctacgaagtcctgaagcacacgtgctgcctctgggattctgtaattgccaagattataatctacatcttttaccattgtgttcatcttggagaggatccacttatccataaccggaagtttatcatattccagagtatattttgttgcatcaaaattatcaatgttcgcataaagcacgaagaatgcataagtattccaaagtgttcccatgaacttacgctgtccttcctgaacggcttttccgtggaaacgattcggaagccacggagcactgttgatgtagaaataccagcggatcgcatctgcaccgtatttctccagtgcatcaaacggatcaacggcatttcctttagacttactcatcttctgtccattttcatcctgaacatgtccaagaacgataacattcttatatggagccttgttgaacagcagtgttgagattgcaagcagagagtagaaccatcctcttgtctggtctacagcctcggaaataaagtctgccgggaactgtctttcaaacagatcctgattttcaaatggataatgatgctgtgcaaatggcattgatccactgtcgaaccagcagtcgataacttccggtactctgtgcatctctttaccacactccggacacttgattgttacagcatcaatgtatgggcggtgaagctcgatatcatccggacagttatcagacattgatttcagttcttcaatgcttccgatagagtgcatatgtccacactcacactgccagatattcagtggtgttccccagtaacggttacggctgattccccagtcctgaacgttctcgatccagtcaccgaaacgtcctttaccgatactttccggaatccagttgattgtgttattatttctgatcaggtcttcgcgaactgctgtcatcttgatgaaccaggactcacgtgcatagtagatcagtggagtatcacatctccagcagtgaggatagctatgctcgaacttcggtgcatcataaagaagtcctcttgcatccagatcctttaatacttccggatcagccttcttcacaaacagaccggcgaacggtgtagattctgccatatcacccttctcatctacaagctgtacgaatggaagatcatattttcttcctacattcgcatcatcttcaccaaatgctggtgcgatatgaacgactcctgtaccatctgtcagagttacgtactcatcacatacaacatagaatgctttcttgcgctgttttgctgcctcgtctgctgcacactgatacagcggctcatactcttttccttccagatcagttcccttgtaagtctcaagaatttcataagcatctttgccttcttctgcaagtcttccaagaactgtgtcaagcagtgcgcaagccatataatatacatgtccgtctgctgccttaacctttgcgtaatcttctttcggatttacacaaagtgcaaggttggatggaagtgtccaaggtgttgttgtccatgcaagaatatatgcatcttcatcttttactttaaaacgaacgattgctgaacgctccttaacatccttgtatccctgtgcaacttcctgtgcggaaagcggtgttccacaacgcgggcagtaaggaacgatcttaaatcctttgtaaaggagtcccttatcccagatctgcttcagagcccaccattcagactcaataaagttgttatcataagttacatatgggtgctccatatcagcccagaatccaactgtaccggagaaatcctcccacattcctttgtatttccatacactctctttacatttcttgataaatggttcaagaccatatttctcaatctgatcttttccatcaagaccaagaagcttctcaacttcaagctctaccggaaggccatgtgtatcccatccggcctttcttggaaccatataccctttcattgtacggtatcttgggatcatatccttgataacacgagttaaaacgtgtccgatatgcggtttaccatttgctgtcggaggtccatcatagaaaatataatccgggcacccttctttttcatccatacttttctggaagatttcattatcatcccagaacttttcaacttctttttcacggctgacaaaattcatgtcagttgaaactttcttatacatgttcttatcctttcctgagtttattttatgattcttaaaaaaagaaaggcttccgtcctgtaataggacgaaagcctgaacttctctcgttaaaccacctgttacatcatacttaggtctgatttctgacctgcatatggtatcctttaacgccggacacgcgtcagtccttactctccatttctacatctgtttcaggaactgctgctctggagtgatcttcaaaaatctcttacttgcaccggactcccaccatctccggctcgctgtaacgttcggataaatcctactgtctccgtcatcgctttatctgtgaacttctacacacggcttattataaagagattcttgcctctagtcaaggtttattatgataaaaaaagtgcgaaaaaacgttgttttcaacgttctttcgcaaatttctgttttcttatctgcggcgtttcttctttcttttcacattaccactctttgcatttcttctttttcctttttttcttctgcgacgtcttatctgcttccggtaattcgcaagtacaacaatgatgatcaataaaatcacaactgcaattacaactccgatcacaattttcataaactttgaaatcccggttacgacagttgaagttgtcttatctttcttttttcccaaaacagctgcactgctttcctctgttttttctatcgcagctttcacactgcctacttcctgccctttataagtaaatgttactgttccggatccatccttgttgctgtcttccttcacttctgctttcacatcagaaaattgtgcactcttcggaagtacgatataagcatcttcatcttcataagacttcacaccttccggaagcttctgatccttcaaagatattttcgaaaaattactgtaagcataatcaaacatcgcacgagtatctatataagcatcatttccaaaatcataaagtacaaccgcaacaagctgcatatctccgttatctgccattgtcacaagcgttgttcttgcctgatctgtgtagccggtcttaccgcccttgcagtattcataataattatcattctgtggccagagcatcttgtgcttctgctgaaaagtacgttcttcattcaccagattcgttaccggaatcgtatggcttaacgattgggaaattgtccggaacgcttccttctgataaactgctgcaccaattcttgccatatcatgcgccgttgtataatgttgttcatcatgaagtccgttcgcattcgtccagtgtgaacctgtacatccaagtttttctgactcatcattcatcgcctgaataaatgtgtcataacctccgcccatcttcttgccaacactctcagctactgcataagagacctcatttgccgatgccagcagaacggcatagagcgcatcttccatactgatctgctcccccggcgtcatgccgatatgggcatcgccatattccagaaaggagatgctgtcctgggaaaattctaccgtatctgtaagctctgcattgtccaacgcaaccaatgttgtcaaaagtttcgtaatactcgccggataatgcttcttttcaatctgcttgctatataaaaccgccccactattcatatccataacgattgcggaatccgcataagttaccggtccctgtggccagttctccacactgtttgaatctggtgcgatcgcataacagttctgacgctgtgtctccctgtcttcttcctctgtctgagttgaatctgttgtggctgccgccgtttcttcctcagcaaatgtctgtactgacggcatcaatatcatagatgccgccaggaaaagagacagacagcgctttccgtatttcttaaaatttatcataaaggaaatcctccggttgtttgaattcataacgcaaaaatccccacagacctttcatctgtggggaatctgtagttttattataagtcgcaacaacttttttttcaatcataatttatcacttttaaaatcactaattctaccaagaatttttcaactactctatgtaaaatttcgtcctgtactctactagctttgcaaataaaatttcaagaatgataaacatcaatgtcatagactcaaaattggtctcctccaatacagtgacttcctctatatttacaaacaaatttttggtgctcattctggccagtgtattattcccatatcgagtcaaagagattgttgtcacacctttgctgttcgcctgaatcataatattacgtataaaatcactttctcctgattttgatacaacaaaaaagatatcatccggcttcatcagttttacaactttgcgcacttcaccctccgccggaatatcattaaccagaatattcaacgacaacatcattctctgaaattcccggcagactgatttctgcagactccccgtcccatacataaaaattcttttcgcattatataaaatctgacagatatcatcgtagttctgtgactggaaatgatgtatggccttgatattgctgtcacatatcaaggataccaaattacgtgacacaggcacttcgtcttcttccagttcaaagcgcagacaggcttttaattcactatagccggataagccaatcttctgtgcaaaacgcatgaccgtactccgagatacattgcataactgtgcgagtgcttcaatcgtcatgttcagacattgttctttattttgagtaatataccgccagataataagatcatttggattcaattcatcataatgtctgctgactaacgcctctaatttcatgccatcacctcattttctcgattatttattatttctatactatcacaatcttcttatttattccacaattcttccctgctccttcctgcttaacacaagaaaaaaactgccgcgctactgcacaccagttttttctttagacgcaatcgtatttctactatgtcttttattttattatgaaagttccggccagtattctttgtttgcctcaatcagctcatccagaatcttctttgcaatctttgcacttggtaccgtcttacttaacgtaagtgcctgccacaacttcagataggaatgttccatccacgcatctaccgtaagtttctcaaccgctacctgctgctccataagtcccttctggaactctggaatctttcctactgccagtggctccggtccgttacttccaacaagacatggaatctcaaccattgcttccggatcaaaattggaaattgctccgttgtttggtacaatcagaagcattctttcttttgtattaaatgcaagtgcgcatgccagatcgacaataaatgttgcatgtgctccgactgcaaaagtatatccttccgcactacctttttcgataatgcctttcgccgtatcaaatacttctttctcacgagaatccattacttcgtttgctctcgtatattctttgtttgaatgctctacaacttcatcctgaagcagataatatttaaggtacgtgttcggtactgtctctggatccaatgcgtaaacatcttttgccatcagataagtatctttccagctctgggcacggtgctgataatcttccgtctccttcgcatatcctttttctttcacaaatgccttcagttcaggcatcagatcctttcctgctttatctgtaatgcttgtccaccatccaaaatggtttaatccataatattttactatcatttcttttcttgattccagatttaggatatttgccataatattttccagtgcaactggcatatcacagatattgataattcttgaattcggacggagtcttcttgtcgcttctgccacaatcgctgccggattggaatagttcagcatccatgcatctggagaatatttctccatataatcaagaatctccagaacacctgcaatggatctcattccatatgcgattcctcctggtccgcaagtctcctgtccaacaacatcatatttcagcggaatcttttcatccagttcacgcatcgcataaagtccgactctgatatgtgcaaatacaaaatcaatgttcgtaaatgcctcttccggatctgttgtataagaaaacttaatctccggatgctgctctttcatcataatttccattgcttttccgattggctcctgacgagacgcaagattgtcatataatttaatttcttctaccgggaatcgataagactcctctgcaagcattaatacaattcctggtgtataagtacttccgcctccggcgattgtaatgttaaattttttcattatattttcctcttttttctattatttctacagtaatttttcaaattcttctcttacgttgggaacactcagaccaacaataacctgaagcgctgttccatttctcacaacaccatgcgcgccattttctttgaaatatgcatccggcagtaccttatcaacatccttcaccgatacacgaagacgggtagcacagtttgttacatcgatgatattttcttttccgccaagaccttccatataaacttctgctgctatctgatatttgttgtctgaactattttctttctttgctttgtattctttctttgtatacagtttactttcttcatcatctgcttctcttcccggtgtcttcagattcatcttaagaatcaatgcacggaacagtacaaaatagatggctgagaaaatcaatccaatcacaatctgaagtacatagcttccaccatgtgtgctccaaagaggtacccagttcagagacgcattctggatcagtcccaaactgaaatctccactgattccacatgcaaatgtgattgctgacatcaatcctgcaagcactgcatgacacagatacaaaacaggagcgataaaaagaaatgtaaattccagtggctctgtaattcctgtgaacattgctgtaatcaataccggaattaaaagtgcaagtactttctttttcttatttggttttgctgtcacatagattgctccgctgattccaagtggtgcaaacatcttactcatacctgtaagagcgaatcctcctgccgggaacattgctgcaagagaacctttcatagaagcgaattctgaaagatgcgcaacccagtatgccttgattccaccgtcaacaattgctgaatcatataaaaatggagcgtaaatgaaatgatgaagtccaaacggaatcatcaatctttcaaggaatgtatacatccctactccgaagactcctgtgcttgcaagaaagctctgcacactggcaattccatcctgtacatgtggccagatcaggcatgcaagaacagaaacaggaatcataacaaagaatccaattagtacaaccattggagaacctttgaatgtctcaacatatttcggcacttccatgtcaaaaaacttattatgaagataaactgcaattcctgcaatgatcagtgctccaacaattcccatatccaatgttcttacactggcaattgttgcaagtccgcttgttctttctacagattcaaaatcaacaccaaaaaccggcccccagtactgcaaaatagaacttgtcagataaagaaaggtagcatagattacaaatatctcaagacatgctcttgcctgctgtttctttgcaagtgataccggaagaccaattgcaaatatcaatggcatctgtttaaataccgtgtttgctccattataaatgatatcccagaccttgtaccaggtagtctcaggatctgccaaagatccaaataccagattattcttaaataaagttgcgaaacccacaataattccaaagactgcaaaaaataacaccggcgtgaacatcgctccaccaaagcgctgtactttttgcatcaaagtacttttcttttcactcatatcctcattcctcctacgtaacttgtttacaactgtttacaaattctctgtcatcaacagtgttttttcattcatgaattactctgtacatataatacatacactctggcgtttcaacaatactttttgtacattatgccccccttcacagcgttagatctctttcacattttctgtgacatttcacatttccaatcctgctgattcaaaaaagagggcgcggattcatcatttgatatgtggtgatatcaacgaataaatccacgccctctttttcattcatttttttctctattgaatctcatacatcataatctgcgcctcttctgcctctaccagaagactgtctgcctttggataaaatcgtgtggaaaatacagcttctccatcattcacaaacacttccacggaagaatgatctaccaagatttctacatctgtaacagaatccaatgcaatataacgcattcctcttccggcagatactgaattcttatcctggcttgtaaaatgcatctcgaatcttccatttttgtactcaagaatcaattcttcatcaatcactgtcctgaattcattgttctgaatgcccgagatattcacatcatagactttatatccatcttttttcaacattccggctgacttatccacaagagttttcttcttttgcaattctctgaccggtctctgacaaactttgccatcttctacaaatacttctctcggaaaagtgaagcagtgctgccacccttctgcgatcgtcggattggtatattcttcacaatccggcattcccatccaactgatatggattcttctgccatcttctgtctcaaagctttgtggggcatagtaatcaaatccatagtcccaaagctgatactcggagagtttatagtcttccagaatatccccatctactaggaagtatccggactgataaacatttctgtcgtcccagataccaccctcaagtccctgcacagacgccgagagaatttttgttccgtctacctcaaaataatccggacattcccacatgtatccgaatggttcttctgattccacgcggcttctgaaattccagttgattttatcttttgactcaaagatcaatgcctgtccgacatcttcttttgtacgcgcaccctgaatcatgtagtatgtatctccgtctttccacaccttcggatcgcgcacatggcaagtcagatctgacgggtaatccacatttctcatcagttctttttttgatccaaatgtctttccatcctcactgacaacaagaaccgtactcgactcacgacctgtattgatgtaatcgaaatctccgtcttccagctttacattgcctgtatagtaaacatacattttgtcatcttcgataaatgctgatccggagtatacaccatgacagtcaaatggctgatccggatataactttactccctggtattcccagtcgatcatatctttgcttgtatagtgcccccacatcttcacgccgccttcggcattaaatggagaatactgaaaaaatgcatgataaatcccattcaactggcacaatccgttcggatcattgagccagccaacaggaggcatcagatgcagcttctcacgataatccgctccttctttctgctctttttctttcatcatctcttccgtcatatctaccagtttgatcagatcccttgttaatgcattcatgctcttgtctcccttttttcatttacagccgttctattctgcaagaattcttctttgaataaaacgactgtatctttttaatcactgttcaatttatttctcaatcttcattgcgagatcagctgttgtaactgttcccgctgctgtcttctctactttgctgaagtcatctgcattcgtcagtatcatcatcgtagttgccggatgtccagctgctttaatagcatccagatctgcttcgatcagcacatcgcccttacgaacttttgctccgtctgctactttctttacaaatccttttccatccatggaaactgtatcaattccaatgtggatcagaagctctgctcctgcttctgttgcaatgcatactgcatgccctgtatcgaagatattcattacttcaccgtcacatggtgctacaatctttccatctgttggctcaactgcaatagttgttccaagcatctctgatgcaaatgtctcatctgcgacttctgctgtcggaacaacagttccatttaccggacttgtgatttcttctacagaaacagttttttcagcagagttctctgtctcttccgcatttgcttctgcttctttattctcaaccgctgcctctgtcctggctgcctgagttgcaggctctttatctttgtaaatcatgaaggagatcacaaatgctactcctactgaaattgccatctcgataatgtactgaagcggctgattcaggcaaagcagaataccgaagatacctgttactcctgttccctttgctccaagatgtacaagtgatgcatacagagctccacatcctccaccaatacatcctgcgataaatggtttgaagaatcttaagtttacaccaaagattgccggctctgtgattcccataaatgcactaagtgatgacgggagtgcaagggatttaactttctgatcttttgatttaattccaactgctaatgctgccgcaccctgtgctacatttgctgcacttgcaagtggaagccaataagttactccatattttgccaactgaccgatgtcaatggctgtgtacatctgatgaatacctgttactactgtcggtgcatacaaacctcccatgatcagacttccaagtccgagcggaagtgtcagcatccactggattgctccaaggatcgcattctcaccccatacgaagatcggtcctacgatagaaagtgtaagatatcctgtcacgaatacgctgacaagtggtgttacaaacaggtcaagtgctgccggaactaccttgtgcagcttcttttctaatacagaaaggatccatactgcaataataaccgggattacatgtccctggtatccaaccatgtcgatgtgatacagtccgaagaatacgctctgtgtctgctgtactccttccgttgcaaccgtataagcgttctgtaatgacggatgaatcatgatcataccgataacagctccaagatactggtttgcaccaaatgctttcgcagctgaaaatgcaatcaggatctgcaggaatgtataagcgatattactgaacagattcgcaaatacataaatagaactatttgtattgattgttaaaaatccatttgcattcataaaatccagtgcattcatgattcccatcaggaaaccacttgctacgatggccggaatgataggtacgaaaatatcacctaacagcttgatggccttcataaaccaattctgcttctctgccgctgcttcctttgcctcagcttttgtgcttgctgtaatacctgcgatcgcgataaattcatcaaacactttattcactgttcctgttccaagaataatctgaagctgtccagatgcctcaaatactccctttactccgtccacattctctattgcctctttatcagccttactattatctgcgataacaagacgaagacgcgttgcgcagtgcgctgcggatacaatattcttacttccacctacatatcccagaatctcctgggctgttttcctgtaatccatgattacgctcccttccttctctattttatgtgtaatcgttttcacattttatgattttatattaaataaaaaaatgccatttgtaaagatggcatttttactaattctgattcttctgttttgtttaacttgcattatgctcttagttacattcattcaaatctattcacgatctggaatcccagcttcatatgcaccggcaccggatttttctcttcaatctgttcaagtaagagctctgcccccttgattccactcgttttatacccaaaatgaaccgttggaataccgcctgtcacagcccttaacatctgattatcaccaaatcctgtgacacagataccagactgttccaaaatgtgtagcatccttgcaccagaattctgaaccgactccggaacctcctttttactctgtgcgatcaatgcctcgattgctcccgctgcaatcgtatctgttgcgcatgatatgatatcgattccattttcttcactcaacaaatccactactgcttcatatccgccgctcattgtaaattctgattcgcgtctgtaccgatggtcatcgaaagtaatcccggcttcctgaagtcccttgcggaacccgtcttctctggcagcacctgccgccttatcttcacgagtaacaccaatatatgcaatcttgcaatcttcaggtcttccaccattccgcttcagtgctttcaacgcaacttcttgtcccattgctcttcccgcaccaaaatcatcatgatagatacagcttgccatttccgtctcctgtcccacaaccacaaccggaacctttgattcttttaaaaatctccgatgctcgtctgtaagcactgtaccgatcagtacaattccatctaccggataactttcaaagattctcaaataaatcagctcattctttggctgattatccgtacttgcaagaagcatctggtaccctcttgccgaaagaacctgttcaattcccgctgtaatccggctgattgattctgaattgatcttcggagccaccacaccgaccagatgtgcacgtccggttcttaggattcttgcctgagtagacggctgatatcccgtcttctcaatcactttacggatctgttcctttttctgttcactcacatatccgccattcaaatatcttgatactgctgcgctggacaccccggccatctgtgcaatctcttttatcgtcattgtatactgcctgcctttatttccctgattttcgaaattatccagatccatttccgctctttttctaactttgacctgaatctgaatgacattcacattttaacattcaacagacaaatatgcaacggcgttgcgctacatcattcttgatctatctgtccacatcatatagaaatccataaagtattactcttccattcgtctgatcgttggaacaagtagataagccaatgatcctgtcccgcccctcctttccttttttctcaggaagacgatactgcaccgcatgtgcctttatatattccatcaattcttccagattctctttcttataatcttgtggattataaataacttcatcatacgcatccgtctccacacaggcgaaccactggattttttctaactgttcattcaaatatagcgtacctgttttgtgtgattcaaaatattccttttctttataattcatcacatccccaaacattgcgccattatccatatggtgaccatataacaaactgtaactgtcaataaattttctgtcatttctgctatccagaaaaatacttcctgaaagagcaaattctccataaatatcctggttgatatattccagatttgtttctccctgcacaaccggataatcaatctttgttccgtctacagtcagccaggcacacacatccggattgattttctgaagttcctgcagggacggactttcatccattttccctgcaggtttatatttcattaattctccgctgataaacgcacgtcggttgatctggcaggtatcccataatgaatatgcaccataaagaagcataagaataataaagagcgctgccagaatttccaatatcttatttcccgcttttataactttaaaaaacagctcttccctctgctcccctgcctcctgaccttctgtcgtttcgtttatcatgctctttttctacgaaagaaaactgatccaagtgcgcctgccgcacccacaagtagtacgtatggtgtgtatttctttgcgacgcctgttactacagccgcatctttctcattcacatactgaactactgtaccatcttcttttgtagttcctgtctttgttccggtcgcagttgtttctccgtcaatcgtagtggtatatccatctttattcgcatcggtctctgttacagtgtatttatcagattctgtcaatccataaattgtaatcgaacctgtatcagaaatctgataagaagtttctgcttcattgcttgtgatgtattctgtaagtgcctgtgcatttgcatttttcttcactacaactttgtagagttctccctgtccaccattcaccgcaaccttaaattcaaaggatttatttttaacgccctgattacctgtgatcgtttttttgattgtcacatcatgtgttgtatcattttctgcaccataatcattgataaattcaagatcacctttttcaccgttattttctgtaattacatttccaacataaagtgctccatctgctccgttatatacaaaaagataaacatctctgcctgctgtatcataatcgattccttcataagaacctgcatcttcagtcacaacataatgataaacaccggcatgttcaaatacctctgcattgatttccaatgttgcattcttgctgtaaactgctgccagtgtatcttctcctgatggctggaatccgattgtctgggtggccttgattccacctgtcacaccggcatatactacattatctctccaattttctgctgcttcaccattctccacatgaaacgaaaatgaagtgtttggctggtatgtatttccatccgttgtcactgttttcttcagattcaactgtgtgatcggttcattttcctcggccgccgcatttaccacacaaactgacatcatcatcatgctcgccattgccattgctgaaatacgtcctgctgttttcttattcataatctctacctcactttttactctgatttccgggtttcagatatctgaccggcggagcaccgtaattactctgccttttatctccttgcccttcacagctccaaaataccggctgtcttttgcattttcccgttgatctcccagaataaaatattctccgcccttcagcgtcagtggatagaccgtgtcactttcgtattgcggtgtatcatagaaaatatcattttccacaatcttacttccattgatctttacctcttcgtcctctgtaatctctaccgtatcatcgccggttgcgatcactctgcccacatatttctctcctgctttctgaatgaccaccacatccccgcttttcggtttttccagtcgataataaaagagcagatctcccgcactgatgcgtggcgacatatcattgtttttcatggttgtaatgccaaacaacatcccgaacaaaacccacagaaacaccagaagaaatgcaagacgaatcagaaaaagatgaatctctccttttaatttcatgaatctttttctttcctctttcttcgaagaaacagaaaaaccgcgcctcctgttatgcctgctgtttctattaggattgtaggaaacatcctgttctctactcctgtcggaacaaccataagcggttgatactgattcgtatatgttactgttacagtctgctccttcgctacatcaatttgtgctgtcatcccctctgtctgactttcctgtcccacgagataaaaggtatgccccagcctgtagttattctgttcctgagcaatctccgtcactgtatattccccaggttcaatcgcctgaagagatgcactccactgaccattttgcggaagcttcacttcttcgatcacttcttctccccgttttacttgaaatgtaaaggactcgtccggaatctgactcgctgcaattccctccacctgttttgtaatcatcagattacctgtttttgccggtgggtttgggagatcctttccaaaagaaatgttatcgagcaggtttccatttgacagatttccatttgctgcctctactgccacaaaataaaatcgagtaacatattgccctgccggaaccgtataatctccatagtgataagtccatttgccggcttcatctgacaatacagcctgtacatcaggattactctgatcaaatcccgatcctgccggattccaatcagaactcattgatttcgtatcgctgatgataaccgccatcgtgtctgttccccagcgtccggcatgttccaatccccagtgaaggactgtccccggttctgtcaaaacatcctgataaagtgctcctggttcctcacagtttaattctgcgaactgatttccctgtgccgcactgctgatgttataaaccggttttggatcattaaccgtatttccataataacttcggcttccatctgcaatctcgatataataatctctctgagttccagagccaaaatatgcacctttcgctgttgttttccaatataaatcattcgttccatttgctacctggataaaatgtgcattcttataagtcagtgttcctgcatcagatacttttggcgtctcaaaacttccattctgaagcttgtcataataattcaccttgtattcggaagaataaactgtcaccgcctcatttactgtcactttcacacgaaatgtcttctgtgcaccatctcttgcaacttcataggattgctttctactatccacagtcgctgtatcctcaatgtctttccattgaccgttttcacttacctgccactgataagcaatctgatctgattctgttgttccactaacctctgctgtcagagaaccttttgtaagaatctcatctttaagagcaactgaaattttctctgaatcggtacttttcccttcctctgttactactccagactcagggggagattcttttgcatctggtttctgcatttctgatcgggaagtctcttccgcatctgtttcttccgggagcacggtacaatctgttccctctgtagtttgtacagcctcaacttgtacaccttctgccagtacctgaacccccatcaacgacagcatcatcagcaccgccatcagaaatgcaaaatgtcttctcagctttcttcgcattttgccctctcctgtcttaaattgaattgttacctttcaggaagtactgtcgatatattttatatctgccctcctgtctaatatatgtatgacgctggatttctgattatgacttgaaagagataaaattagatttctttaagattttttacatttttttaaattttctcttgcaaagactatttaaatatgataatatatttttcgtcgataagacaaggaaatattcctccttagctcagtcggtagagcattcggctgttaaccgaagtgtcgttggttcaagtccaacagggggagctatgaagaacatctcacagatttcgcgctgtgggatgtttttttgttgcgtaaatctgacacagcttgtcagatttttccttatccactagctctaaaatgctacgcatttcatcgctgtggcgtatccgccacagtgcgcatccttagcggagcgtttttaatatattaggaaagaactttcctaatatacaaaaaacggactgtgcaacgcacaatccgtaatcctagtggagaatacgagagtcgaactcgtgacctcctgcttgcaaggcaggcgctctcccaactgagctaatcccccatatgtatgttctcaacagaacttctatatgatatcatagcttatcgagagtgtcaaccctatttttaatatttttcttttatttttcctaccggaatccaagtaaccagatcaacagcggattatggttgtacaaaaacgtcaagatcgcgctctgctcaaccatcgcataacacgttgttccaatctctgtcgtataaatcagagtcagcacaaggaatgcgatccatacgataataaatcccagaccaattccaagcactcctcccgccagatgattgatcgcaccaagtaacggaagttcaccaataatattcaccgcatacatcaatgcgcttacaagaatgatcgcaatcaaaaatgtcacaagaaatgacacaacattgaggagcattcgtgaaatataggccgcaacatattctgggaaagttgtaacatccagttcttcataaatcgcagtattattattttccagcaatgcatctttcaaaaactgtggcagcattgaattctcaatctcacggatctgtgtatcctttggaagatctccgaccactttcaggatatcctgtgcagttatccccagtttgtcccatccagattcgcttaatgatttaatctggtctaccgttaaattctccagaggtgttccactgagattcgctttcaacagatcatctgctgaaagctctggcataaatgcttccactatcttcttctccagtacgtcctgcgccggtgtatgcttcatcagcgcatccgacacgtatggggaaaggaatgacaccagtaccagtgtcaatattgttgacagaagggataaaccaattctgagaaatcccttcacaaagccggcaatcatgcagactaaaaacacaatcccgactgcaagtaacaaccaattctccatatatctctcctatcttgtcaaataaacaattcgtagttcattatcactcatcacatagtatctgttcaggccaaatgcgtcaaagatttcctgcgcatctgctcccaggtctcccttaaacttcaggattcctgtcgttgtataaatacagcacttacttccatcatacagaatgatattgtctccatccatctttacatgactataatctccctgtatctctttactgaacacagtatctcctgattgattatacattctcaactcataccctgacttctcctgattaagcaggacaaatccaaaataagaatccgaatggaaaacactttttatctcttgattcactttcacttcttttatctgctttggagtatcttttcctgtataaatctcaaatccattatctccaactgcaacagatctgtcatttcccataaagaaaatctcgccgatcagcatatcttcataagtatctgctgtcactttgttatctgccttctctttgccggcagtatcaaaattataatatccgatcctgctctgcacctgtgttcctttggtataaagataagaaactgccagaacctttccatcatcagacaaatccaatgcgatcggatatcctgtatttccaatcgtaatctgctgctctaccagaatatttcctgccgcatcataggatatgatcttcggtgaagtctcatcttttaaaattgcactgacaattccctgattcgatactgcgattctctcaatcggtaatgtcgtctgaatctcacctttcaacccattttttgtaaatacgagaatactgttgcctccgctgtcagcaaccgcaaacacatcgtctttcacaacaatcaccggtgtctgaagctgtgttggctgaatccatttttcctcattcttcttatttagaaataccacaccgtcatgattataacgcacaattccatctgcaaactgaacgtaattattcctgtccgaaagttcttttgcgtaactgtctgccttgcggactgtgccataagtcttactatctaaaaggaggtatgttccgcagattgccatcgcaatcaggatgatataggtaagaagttcttttcttctccggcgtttgatccttctttccctttgtctcagcgcttttctatcatcctgcgtttttaccacctgtaaattcgacattttctttcgcgccatattgctccccttatcgtttgtccagtgcacctttttctgttaatacacttttagctttcacttgtctttcacagtataacacggatttatggcaatatcaatttttgtccaatatagatcaggttcccattctgcaatccattcatccggctgatcgcatctacatgattaacatctccatacatttttttactgataattgcaagggtatctcctttttccaccacataaataccatcattttcatctgctgcaacggcagtcccggaaaccggaacactttctgtattcttatcttccgtctgttcttccccttcattttcttccgttatctctgcggattccttttctttatctgctgcttcctgatttttctccacagtagctgctgctccactcgtctctttcacatcaggtgaggatgtttgcttttccccctcggcaaccacatttatcttattctggagggatttcattttgctgaaattattcatcatagaaacacccatcacgatcaggaccagtacaaggcatgtactgattccatacatcagactgcctgtccttcgttctcttttctgaccgccccgttcacgtaccagagaacgaaagctttgtgcagccgtatcttccacattttctgtctgaactgccccatttttttttcgacttgcaatcatataattctgcatgcacggattcttctcgtaataagtataatgtcctccaatttccatcagatctcccagcttatgtacaaaaaatacatcttcctggtttgtcgaatctttcataacaagaacggtatttttctttggaaataattttttatgcagctttacgttgatagaacccggagccagctgtaaatcatgctctgtcacaaaccagcctatgatttctccttcttcaaaatactggctgcattcttcgcaaccacatttccatatcttgtcattgatcaggtattcaccgccctccttttttaactcttttatttttatcgcaccataaatataaatatattcttcattgtcctgcttctgcatttcaccaatcagaaaggctccttctggttgtttttctttctcgcttttttcacttaactgaagaaaaaaagtatctacataatcttccacatagatttttggactatcactcacatttcctatctgacgcacattttttggaatctgtctctccattttatactcacctttctatcacttttatttaatttcccggggattgcccttaacatagcacaaggaaatcgggagattttatcaattagtgtcaggtaagttcgacaaatattacttttcgtgcacaacattttcttaatatctccaaacataaaaaaacgctccggtactctctgattgcagatattctgtaaacagaaagcgcgaagcgttctttttattagattattgtaactgttcagagccaacctccaaaatgctacgcatttcgtcggtgtggcgtatccgccaaataaaatttcaaaaacagtcttaaaaatgcaagcattttacacctgttttatgaaattttgcttggctctgaacagttacagattattttgcaaatgctttgattttctcgtagatgctgtctgtatcaagaccatacttcttcagaagctcaagtgccggaccagactcaccgaatgtatcattcacaccgatcttcataacctgtgtcggagctttctctgaaagtacatcacatacagcacttccaagtccgccgataacggaatgctcttcaactgtaacaacttttcctgtctctttcgcagctgctacaacaagttcctcatcgagaggtttgatcgtatgaatgttgatcactttcgcatcaattccatctgctgcaagcttctcagctgcttccagacagttacttacaggaagtcctgttgcgatgattgtaagatcttttccttctcttaatacaacaccttttccaagctcaaatttgtagtccggtctgtcattgatcaccggcactgcgagacgtccaaatctcagatataccggtccctgatgctcgtaagcagcacgtacagctgctcttgcctctacatcatcagctgggttgattacaatcataccaggaattgtacgcataagagcgatatcctcattacactgatgtgttgctccatcttctcctacagagattccggcatgtgttgcaccaatctttacattcaggtgtgggtaaccaacagagtttcttacctgctcaaatgcacgtcctgctgcgaacattgcgaaagaacttgcaaatggaacttttcctgttgttgcaagacctgctgcaacaccgatcatattagactcagcaataccacaatcgataaaacgatccggatgcgctttcttgaatacacctgtctttgtagctgctgccagatcggcatcaagtactacaacgttatcatattctgttccgagttcagccaaagcattaccgtagctgtctcttgttgcgatcttctttacttctgacataatgcttcacctgctttctctaattcttccattgcaatcttgtactcttcatcgttcggagcttttccgtgccatcctacctggttctccatgaaggatacaccttttccttttactgtcttagcaataatagctgtcggctgtcctttgactgtctttgcttctttgaatgcagcatcgatctgatcaaagtcatttccatcaatattgattacatggaaattaaatgcctcaaacttcttatcgattgggtatggagagttaacttctgtaatttctccgtcaatctgaagattgttattatcaacgataacaacaagattatccagttttctgtgtgctgccagcatagaagcctcccatacctgaccttcctggatctcaccgtctccgagcagtgtgtatactctgtagtctgcattgtcaagctttcctgcgattgccatacctacagctgctgaaattccctgtccaagagatcctgaagacatatcaacacctggaatgtgtttcatgtccggatgtccctgcagataagatcctgtatgacgaagtgtcacgagatcttccttcgggaagaatcctttctgcgcaagtgtagaatataatcccggagctgtgtgtcctttagaaagaacgaaacgatcgcgatccgctttctttggatctttcgggtctacgttcatctcttcaaaataaaggtatgtaaaaatctctgttgctgagagagatccacctggatgtccagcctttgcgctatgcagtgctgttacaatccctttccggatctcattcgcagttttcataagctctaacttgttcatgatatctcctttttaatttccattctgattccattttcagtcttaacgttatttcccggattactcaccaaaaacagcaatataatcctttttaaacttctcgatacctgcatctgtcagtgggtgatgtgtcatctgttcgattaccttgtaaggtactgttgcaatatctgctcctgccagtgcacattctgttacatggattggattacgtacacttgctgcgataatctctgtctcaattcctgctacttcgaacatctctacgatctctgcaatgaggtcaactccctttgtagaaatgtcatccaggcgtccaaggaacggagaaacataagtagctcctgctcttgctgcaagaagtgcctggtttgctgtgaagatcagagttacatttgtcttgattccctctgctgtaagaactttaacagccttcaggccttctactgtcataggaatcttaactaccatgttcggatggatctttgcaatctcacgtccttctgcgatcatgccttctgcatctgttgttgtagccttaacctctccactgattggtccgtctacgatagatgcgatctcagcgataacttcttcaaaaacacgtccttcttttgcaatcagagacgggtttgttgtaactccgcagatcactcccatgtcatttgctttcttgatatcctctacattagccgtgtcgataaaaaatttcatttttaagtcctcctatacatgaatcttcctcttaccactgatacaactcactgtttttccagcagtaattcgtttgtttatgagctgattatatagcttccaaaacctgaggtcaactgtctgaaaaattattaatagtcatttttcacttaataatccgacatattaaccgtttttattaatattagttaatatcaatcgtttttattctgtataaaaatctttattttaaaggctttatcaacattttctaaaatcagaatcgtttgtttttgttgtttttattagtaataattttattattttttattaattttaaataatccagcgtctatacatcaactattttgtctttgcataagacgttgttccacgaaccacgatctgtggctcatattccacatgataaatactgaccggttcaaattccgtatacttccagtcccttgaactgatctttttcatgatgatatcacaggcatccattcctttgtgaaccacaaaatgctcgatcgttgtaagtgacactttcttaactttggaaaataaagtattatcacatcccataaccgagacatctccgggaactttatacttcatatcctggagtgcatccataatcccaaatgcgatcatatcattcagccccacgattgcagtgagatctttttctgtccggagcagttcttttgtcagatcatatccgatgcggtactctgaatcgattcccggaacattccggtcaaattcttcatctgcttcttttacaatcacctgatcgccatatccggctttcctgaattcatccagaaaaccttccacccggcggaatctctgcttctgtctcgcagttaatggcggtgtaatgtatgccacatgctgatgccccagttccagaagatgtctgcccattaatcttccaagctttgtattgtccaactccactgcatctacatccaaatgcttctcctgattattgatcacaacaaccggaatcctttcagacatttctttgagctgtccgagaaagcatttccccggattgcacatatagataattccctgtgcattcagagtcgagatcattttcagataacgctcttccaattttaaatctctctgtgtattacagacaaagattccgaacccctgctctgttgcccttgattcaattccttgcaaaagcattacatagtatgggtttgtcaggttcgggctgatgacaacgagcagtttttctcgtcgctctccacgctgtgttctgcgtttcggaagttcataccccagttctcccgccgctgcctccactttctggattacttcttttgaaaaagagacgttatacttcttattgagtaccatcgaaaccgttgcctgtgaaactcccgcgcgctttgccacatctgaagatgtaacttttttcttcgccatagccagtccctcctgccggtgtctcaaatgcttttacaattctgttcttccttccaatgcccggagcagtgttacctcatcaatgtattccagatcaccaccaaccggaacaccactggcaatcctgctcaccttgattccgaccggtttgataagtttactgatatacattgctgttgtctcgccttccagactggaattcgtcgcaatgatcacttcatccacatctccctgcagacgctccatcaattctttcagacggatatccccgggaccgattccaagcattggagaaattgctccatgaagtacatgatagactccgttgtactttccggtcttctcatacgctgccagatcacgcggtgtctccactaccatgattgtcttatgatctctgtccggattgctgcagattgggcagatatccttatccgtcaacgtacagcactccttacagtaacggacattcttgcgggcatctacgattgcattcgcaagtccttctacctgttctaccggcatattgatcacatgaaatgcaagtctttgtgctgatttattcccgattcccggaagtctcgagaactcctcgatcagacggctgatctgattactgtagtaatccattagaacattccgcctccaagaccgccaaatccgcctgtcatcttagatactgctgcatttgtctcctgctcaacctgacgcagtgcttcatttgtcgctgctacaatcaggtcttccagcatctcaatgtcgtccggatctacaacttcttctgcaagttttacttttgttacttctcttttgccggatacagttacttctactgctccgccgcctgcagctgctgtgaactcttttgtctcaagttctttctgctgctcttccatctgacgctgcatcttctgtgcctgcttcatcagattcgccatatttcccggcattccgccgcctggaaatcctccacgctttgccatgtctaatcctccactgttatttccatatttattttctgttctatgtccacaaatgtatcctcaaagtgtctgccctcttctacatggcggacatctacctcgactttctttccaatcttctcttcaatgagctgttcaagttcctgcacatgatcttctctgccaaccatatctgccgacatagcatctggcagtacaatcagcaagcgattgtcaccaccaagactcagtcttgcttttttaagaaagcctctgatcatacctgacgcttcatctgcgatagaacggaaattcttcaccacttcctgcacatcctccggaattgcattcggcagctccggtttcgccttcctgcttcccgcaacgcctgatccggatgatgacgcatcatctccattcacgtaaacaactcgctgcggcatatctgcggctgcagcaagtcctttctctactttgtcttctaccgcacgaatcctgtccagaagtgcatcctgaccagtctccatcgccggagtacaaagcttgatcagtgcaacttccagaagcactctcttctgcgtcgcatacttcaactgaccggaaagttctgagaatatacggatataacgcaacagcatatcaagttcaatcatctttgattcttccttgagctgcagcatattttccgtagacacatccagcacgtcctctatattatcagaagttttaaccaaaagcaaatttctcagataccatgtaaaatctgcggccagctgggtcagttcacgcccctgcataaccagatcttccacgatatcaagaactccagcaacatctctttccaatacttttcgaagcaggcggctgaacacatccgtatccaccgcaccaagtacttcaagcacatgatcatacgtcagcttctgtcccagataaaatgcaatacactgatccagcagactgagtgcatcacgcatagacccgtctgccgcctttgcgatatagcgaagtgctttttcttccacttctacctgttctgtctgcatcagatcacgcatgcggtctgtaattgtctcaatgctgattctcttaaaatcatagtgctgacatctggaaagaatcgtaattgggattttatgcacttctgtcgtcgccagaataaaaataacatactccggcggctcctcaagtgtcttaagcaatgcgttaaatgctccgatggaaagcatatgcacctcgtcgataatgtatactttatacttaccttctgtcggtcgatatgtcacttcctcccggatctcacggatattgtcaacaccattgttcgatgcagcatcgatctcaatcacattcattgaagtaccggcagcgatagatttacacatctcacactctccgcatggacttccatttaccgggtgctcacagtttactgccttcgcaaatattttcgcaaccgttgtcttaccggttcctcgcgttccgcaaaacagatacgcatgtccgatcctgttcgccttaatctggttctgaagcgttgtaacaatatgatcctgtccttttacatcttcgaattcagaaggacggaactttctgtatagcgccgtatatgacatgaattacacctcgtctccgaagctgataccgattgttctcgcttctttgatcagaccacagttcggatcaacatatttcagctttcctgcaacctcttccaacggaactttcactgtctcaccatttctcatagctaccatatatccgtattcttcattcaggatcaattctgctgccttcgctccgactcttgttgcaaatacacggtcataagaacaaggtgtgccacctctctgtgtgtgtccgggaactgtgatacgaacttccttgtctgtctcttttccaatctgttctgccagttcgtaagcaatagaaggatattttctgttcgccagcttctctttgtactctttctttttcagttttgcatcttctttggaaatcgcaccctctgcaacagcaagaattgtaaatctcttacctgcctgtgtacgtttgtcgatcacattcttgattgctttaatatcatatgggatctccggaagaagaattacgtctgctccgcctgcaattccggcatgcagagttacatgaccaactttgtgacccataacctcgataataaatacacggctgtgggaagttgctgttgtatggattctgtcaatcgtatctgttgcgatatcaactgcactctggaatccaaatgtcatgtctgttccccacagatcgttatcgatcgtcttcggcagtgtcactacattaagtccttcctcacgaagaagatttgctgtcttatgagttccatttcctccaagaacaacaagacaatccagatgaagcttatgatatgtgtgtttcattgcctccaccttgtctattccatccttgtccggcacacgcatcagtttgaacggctgacgggatgtaccaagaattgttccaccctgtgtcaggattcccgagaaatcccttgatgtcaacatattgaaatccgaatagatcagacctttgtatccatctttaaatccatagatttctacatctttgcgcttgttgcaaattccttttacaacaccgcgcattgctgcgttaagtgcctggcagtctccaccactggtcagcattcctattcttaacatggcaactcctcctattactctttgtacctgtctcttaatcagttactttcttttcttgtttataagccctaaaaaagcagttggttcttctttccctgccgccattcctgatattccatgaccggcggctaccaactgctttttattataccttatttacaaatgctgctcaagaaattttagttttcgttatgttaaaaattcttccaatatctgacgaatcgccgcttctctttctgcatttcttcctgaatctctatctaagtctctctctgaatttcctgacggattccttgccggctctaccgttcttggttccccctcgatattgatcggcaactccgtcctctctgctttcgttttatttccaatctgtacgtcgtcttctctgtgtatctctctttcccctttcttttcttcccactcctgctttccggtattctccgcagcaatcacattcaattcttctttatccgtcgtccgctgtctctttatgtgaaatacacaattattctcaagataatccaccatatacatcctgacagcattaagcttgtactgttcgtctgaaagatgactgataacaaaaaggagtaccatctccgctaatcctgtttctatatattgatacgccgcacctgaaaatccataagtaatataacattcgaatgcaccaagagctgcaagaattccaacaaaccacaccgtcaacaattccatctgtctccaggtatgaatcccaaacaaaaatcctctatattcataaatatatttctccacaaatgcattcgtattctctacactgtcatgtaccatacatgcatgttcgtattttgctcttacgagttttatcagtcggtgtgtactcttggacatattccctgccgccttcagcatttgattcaatgtctgctgattcactgctttcgccagcactccgattatgcccagaagtgccatcagataatagatgactcttgtgttcactgccagttctcttaacatagcaacccctcctggttttaaaaatattgcgtaactgttcgggactccccttcgttacgtttgtagatattataaacctgattttatattctgtccgcataaatcgttctacagatttctacagcaaaaatcaaaattgtcgtattgaggaaaatcatgatgaaagatgtgaaaagaaaaattgtttttttatatttgatttgctataattcaaaaggtaactaaagatctaaaatttaaaaagaaaggatatctagatatggattatagaacaaaaggtgtctgttcccagagcattcactttgatatcgaagataacaagattcataatgtttccttcgttggcggatgtaacggtaacctgcagggaatttcccacctggttgaaggaatggatgtagatgaggccatctcacgcctggaaggaatccagtgtggattcaagaaaacttcctgcccggatcagctcgctcaggcactgaaagaagcaacaggaaaatagttaaaaaatagcaaattaatagggaaggatcgctactcttgattcaatccttcccttctgccctactagtccatggactgattaacagccgcttttggtgattatgtgctcatttatttaattgtggtgtatcaaggaacaaggctctcacttttatctattagaatctaatttgtgagtgtccgagcgaaccaccgcgcagcggctgttaggccagcccacgggctgcatcttctgccgttgaggtgggagaaagatgcttatgggactaggataccgtcggtgtaggaaaatgtttcctcaaccggttcttctcccattcttacaaaatgatctgcatgtactctgtaataatatccccggtcaacttgaattgacttcgatgcagcaacataataatcattctctactttcttagaaaaagcatcaatctgataccattcatcatctttctcactatactgatccacataaacaataaccgctactgtatcaactgtatgattagccgtcgttgcaccatatgtataaattcgttttgttcctgcttttgtgattgaacattccccatccatcagatgtttacctcgttcatcactcttcggtgtatagcctgttgatgaatctgctgaagttaaataagatccgtcaacaactttaacttcactatcatctgctttaacacctgtcactgatgcacacaccataaaacaaaacaccatagtacttgctgcaattgacattatttttttacttatcataagactatcttccccctcttttgttatcgtactctgataagtaaacaactgagattaaaaaaacttacgcatttttacacaaaaaataaattttttaaaattttttcaaattcttctttctccataactccctttaactgatactgaatgcctttatcttcaaattcagctatatatctttttccttcttgatcttttacctcatactcttttacattaatttctttttctccattcattacaatatcctcatctaacaatttatcaactgctttctgtcccaaggaagaatctttagaattcatatacattgtgtaccgaataatttcgttttcatatttataaaataatgttgctcttctttgatctccgtctactgtatactttgttaataccataccttttggcttatactcaagtcgaaccaaataatttcccattaccttggcaatttctttataaactccaacctcatcaatatcctctgattccttcgtttccatatcctccacattgatgatattagaattctcatccccatcttctcgttcccacagaactttccaatacgacttactccccacactggtcatcacacttccgcacaccaaaatcagcactgctgccagtgctccgattacaagcttgcttttcttctttttgcggatgacttttttatgccttttgtcgtattcgtaatcctgaatcttattgaaaagctctttttccatctcatcggacactttaatgtcatccagagatctatcctctcggactttcttttcaatctgttcagcttcttttttcatttcattttccaatgataattttttcagttttttcattttcttcaccttattctctccagtttgtgtgtcccgtttttcttgacattttttcaaataagggtaatatgatgctataaggctagtgttctcaatttacttcgaacagtagcactctacactaaatctggaggttaatttatgaagcgaattatattgaccggcggcggtactgccggacatgtcactccgaatatagccctgattccaaagcttagagaattaggctatgatattcaatacataggttcttacaatggaattgaaaaggaactgattgaaccttttggaattccatatcatggaatttcttctggaaagctgcgccgttatttcagtctgcagaatttcacagatccattccgtgtgatcaaaggctttggtgaagcccgtaagttaatcaaaagcttaaagcctgatgttattttttctaaaggcggctttgtttcagttccagttgttcttgctggaaagcgatgcaaagttccggtcattattcatgagtctgatatgacacctggcctggcaaataaacttgcaattccatctgctgtcaaagtctgctgtaacttcccggagacgttagatgctcttccggaaggaaaagctgttcttaccggttctccgattcgtcaggaacttcttactggtgataaggatgccgccagaaagatgtgtggctttacagatgaaaaacctgtcattctcgtaatcggcggaagtcttggtgctgtagctgtcaacgaggctgtacgtgctgcccttcctgaactgctgaaacagttccagatcatccatctctgcggaaaaggaaaggttgatgattctctgaaagaaatcaaaggctactgtcagtttgaatatatcaaaaacgaactgcgtgatctctttgctcttgcagatgttgttatctcacgtgccggtgcgaatgcaatctgtgaactgcttgctcttagaaaaccgaatcttctgattccgctttctgcccgtgcaagtcgtggtgatcagattcttaacgcacactctttcgagcgtcagggattcagtcttgtaatcgaggaagaacagcttacgaatgcaacgcttttggatgcagttcataacctgtacgaaaaccgtgagcagttcataaatgcaatgcacaattctgggcagcaagatccgattgctactattatcggcctcattgaggaagctgccacaaaataatgtagttcatctactggcaaccgtcttcataaaactacagtattcaaaaagataccgggaaactatcggcaccactgttccttatacactttttctttgtacattgaacagtaaacatttggttttgctcttagtcttcccggttcatttcttcgtactccgttccgtactttttcttaatccatttctttgctctgtgcagaaggctatgaagcacttcaagtcgaatgcccattaattctgctgcttttgcctgaggcatctccatgtaatatacaaggacaatagcatcgtaccatctttcattcttttccatcaaattggtgaaaatcttttcatgaagctctaacctttgtttctgaagctcatcttccagaaactgttcctctgcactttttacctgtgcttcatatttctcggtatcctcttcactgtcccaattctcatcaatctcgaaaatctcccggctatgctttttcttgtaatttaatgccgcattttttgccgttgtaaacagccatgaagaaatatttttcttcttcatgctgtcatatcccatatacagtttcagaaaagtgtcttgagtaatatcttccgctgcactataactgcctgaataagtgtatgccgcttttagaatgagatttttatattgttcataaatctcattgaattcgcgattttccgttaacatatcttctccagtactactttaatttttcaagtatttctttcttatcttcttctgtaagttctcccgtatgccatccgagacctacattgtcattcttatatcttgggattaagtgcatatggaaatggaataccgtctgtccagctgcctcttcgttgttctgaacgatattataaccatcacatccaagtacatccgtcatctttgtaatcatctttttcgccagacagattgcttttgaagctgttgcctcgtcaatatcatacagattgcggtaatgattcttcggaaggatcagcgcatgtccttttgatgccggtccaagatccagaattactctgaactcctcatcctcatataatgttgctgatggaatctctccatttgctattttacagaaaatacaattatcatctctcatgatctttcctctttccattttattttatctgtagtatagaccatttttcagaaaaagagaatacatttttcagacaccaggtcgaaaaaggtcgaaaatagtcgaatgatttttattgaatgctgttttcggtggtgctacactcttagcgaactcaagaaaatctaactattaggagtaagtattatgttaacaaatatcgatcttgaaaaaatgaaccacctgatggaaacaaacaaagatgcaaaagagattatcacccagcttctgaagaaccatgatgctgctgttgctacaattgcgcatgagatccgcaaccctatgacggttctttattcttctatgcaattaatgagctctctttatgctgaaactgccaaaggttcctgtgtctgggaagaatgcatggatggcgccagacatatgtgtgatttactggatgatctgacagaactcaacaacggaaaccagttaaaccgtgcttcctttcctcttggacatgttcttcgcaactctgctgttctgttcgccatgtctctcaactttgagaaatcaaagattgagatgacttccagtattgataagaatataaaaagattcaatggtgatcgcaccaaattagaggaagtcttcttaaacatacttacaaatgccaaagacgctcttgccgattgtaagtatgccccacgtctgcagtttcgtgcaaagaaacttgacgataaaattctgattcaatgccaagataacggctgtggtattccaacggaaattgttgataagctttatgaaccattctttacaacaaaagaaaacggtaccggccttggtctcgcagtttccaaaagaatcattgaagcacataatggaacgatcgacattacatctgaccataccaatggaacaatcgtatcgatcacacttcctgcgtaaaatatcagatatcattaatatcagattccgttaggatcttttgatctttttcttcgataggttagcagcgctgtcaggaaaccgcaaatcaatcctcctacgtgagctagattatctacgcctgtactggtaaatccaaaatagagactcagtacaaccataatcagcatgcctcttcctgacagcgttccgagccttcccctgtttgcaaatacaatccaaagcacccctcccattagtccgaaaattgctcccgatgccccggcagatacaatctgtctgtcgtgcatgatattccagtataaagacagcagattaccgcctattccgctgataaaataacagaacaaaaatcgaattttaccggcctctttttcaaaaatcgatccaagagcccacaaaagcaccatgttatttaacaaatgtgagattccaaaatgcagaaaaagactggtaaacagccgatagtattcctgattttctataatatacggttcatacatggctccatgctgcaacataaaataaccatcctctgtccgtccgatcatggtaagagcaataaacaccagaatattgattcctatcaacatgatcgtcattatttcttttggtctctctttcattctttctgactcccttttgacttctatgatatgtttttgaatctgcgtatactataccacatcctatatatcattcatagtcatcggcttctgttatcagatcttcccattctccccattttccagacttaaagcgttttgcaaatttcttgatcggaccatatctcttttcttccatcactgcataattccctcccgacttgctataatagctgttttcctgtacctcaatgttttgattttcttccatttctattctgtctttttctctcttactttcttctctgatcttctcttctttggacttttctttcctgttttttgcttcttcctcatactgctgcagtatgctttctatatcataggtttcttttagcgtttctttgtgaagcatgcaggcaagttgaatactctccagatcctgataatcaactttccttacaaaatactccgtcagctcatgataagacacctgccaggtcttctcattctctgggaaaaaacagaaaaaatagttttcatccttttcaaaaatatatttttctgaaagcatcagataatttggttctaacatataatctttcattttttccataacactgagaaattgtcttgtcagttttaatatctcttctgctttgatatctttatttttataatacgtttccaacgactgtgaatgtcctgtatgataataatatctacttgcaccttccattccacatccacttactctcaataatcctggaatccgattattcttaatcatccgcatctgataattctcccgatacggttgtacgctgtctattatgatttcagactctgccactctgctctgctgatttatctttttttctttcatctgattttcttctcccttcactttttcagctttacagaagtctattttttccatctgactttttcttctggtttcaccttcgttgcacgttgtatcaggtgaatcttcattcgtccttttgatgcaaaaacttctacctctattttcttccctgatagatcaactctggttgttacattttccagaaaaatcaattttccactcgtcctttctcggaaaaaagcatccagatctacatcttctatctttttcctgtccatttcaactcctgtcacagccgtttccgctgccgctgcgtttaaaattgccttatcatgaaagtaaaaaataatcgtgatgagcagaaaaaataaaattaagcaaaaaggaataaggtaagacatctctaccactgtacttcctttcacgtattttttcgtatatttttcagtaaactccaccaatcatgcctcccagataagcaactgtcagaaatggaataaacggaaatgaattttttcttgtatacttctttcgtgcgatcataatccctccgtaaacagatgcaatcagaaatgcagcaaacagaatccaaagaagattccatccaccagataaaattccaaggatcagaatcaatatgctatctccgtaaccaaacgactcttgtgtgaaccaacttaaaaagagaaatactcctccacacaatccgccggctaccatcatcctgagttctcctttgctgcatagtacctgacataaaactgtaatcgcaagcaaaatcaaaagacttcttacacttactttcttccaacgaatatctatcacagacaaaatcaacagatacaccgctataacagcttgaaaaaacatccatagattttcccttccattttgcccgaatacattcattattttgcacatttagaacatcctcctcttcctgctacttcgcttttatgaactgcacgtattgttctcttcagagaactgcaattcaatgagttgtgataccggtttccataactggtaatatatacaccattcattgcctgtccataaacacattgctcacacttatggtattttcctccaccttcatttctcatattttgtaattctgagtattgaacatattgaatagataattgaagatagctgcactgataatccgaatgccacactgttcctttttctgtgatatagacaatctgtccgtcttcattttcctttctatctttttgataaccattccatgcactgactttaaactcatctttcaacttcaccgaaggacttttcagtaatggaaccggaatctttatcttgtactcgataacaacatttatctcttctgttcccggaatccaataagacttccagcaactgatcgctgatgtaccaccattcagaatacttctctcaattctttcttctccaatcagattcaccagatttgattttaattgaattgtattcaatacaggaaggacagccgttgactctgctgcctgtttggctgcatcacttcctgctgcatggatacagcctcgtatactctggatttcaattaaaaaaatcaaacttaatactgcaaatatgaagaggggaactgcaaatgcagcttctattgttacacttgctcttacccccggtgcagatgccctttctcttgttggactggtattttttacctgtttatttgacatcgcagcttttcctttctaaagtgtgtgggtttcctgcaagagggattgcaggattctgagtgtacgttttggggtgtacaaaagaaggtctgaaagggcatctgcaccgggggtaattctggcttcattcatatccgaaataaaccggatattggtaacttagatttttataaacgattatcttattctgtatttctaatttagtcacacattgatctgcctgaaataaaatatgtttggaatggaatgactcttctacacaatctaaagtccgcattgtaatttccggcactgattttaaaaagagaaacatcctgatataatcggaatatccgactccttctccggaatcattcccccttacacttccaccatctgtcagaagaagtggcagctgtgacagagaaacaacccatttatctgcactttttaccagtggaacttttcttccatccaaaagacaacgaagatccataacactttctcctcctgcccacgcaacaagtatcatctgtttcaaagcttctaccgcttcaggcatcagtagtagtgcagatattgtcacagccagtgcttctgcctctgccactcgtcccatatcctttgccagacagccataatttcctgatattctcagaagaaaaagacgaaataacacggattctagattttctttatctgatccttttccttgtagaatatattccagttcgtatgctaaagcatctgaccgatcagactgccattccttctctccactctcatccgttccttctgattgttctgaatcctgccgaaatgcatagccgaatgttttgagaagatattcgttgtacaaaagtttctccgttgtctgatcaagtccttttcttgttgggaatgtcccatatccttttttcaaagttctctttgatgcctgccccgacaaatgaacactcttttcagatactttttttcctttcggaatcacaacagaaagaatcccttctttttttatcttttgcataatacgaaacggattctcctcgtctggcagacttggaccttcttccacgtcttctccttccgtttgactgccggatgcgtcaagactgtcattcacccgttccattgcatctgtcatttcatctgtttttttctccatatcagattcttctgtctctgtctgttcccatttctctgttgttccggtaaacttttttaccagattcattccatacctttgttccatataagccagcacctgttctcgaaatgcctgtccggattgatctgtcaaatactggattcccttgatttgatgatctgtagaacccgaattgtaataatgcaaacgctggatcagattttcttcttcataatttcctgtcctgtaaccaagatcaattccaaaaacatgatattgttccataagttcctgatgatattctccgaaaacggaatagattgcccgatctgtgtcaattctgctgagattttttgatccttgaatcacagcagactctagaattccaaagataaatgaaagtaacaaagtaaatgataaacttaaaaatacagtgatttcgccttttacggaccgcatgctatatgccggagctttctgatgtcactttctcaaaaatcgtagtgatcaaactaatcaactgttctttaaaaatcagcagaagcgcaattaatataaccagaattaaaaccagttcaattgttgtgatcgcagcaacatatttcttatctttattttttcttaccaataattttctcatcttgtatctctccttcttttctctcttttttctcaaatctgaatcgtcaaaaacgctggaacagtcacgatcacgaacacgactgccaacataagaaacaacggtatcatcaactttgttcctgcctcttcaccaagtttctttgccatattttttcgttcctcaaaagcttcctgcgcctctctttgtaacagattcgtcagtcccctggttccttttcttaaattctgacttaaaagcattccgaactttcggtaaaccggactctcgcacctccttccaaatgcctcgtagcattcacattccgttcttccattcttcagttcattcattgtatatctcatctcttcatacactgttctttctccaagatagtgtttctctttgtcatattcttttacaatttggatccaggctcttctcactgtcattcctgcccctatatacagactgaatttattgatcaactgcggataatcaaactgcatctgtctgatttctttctttcgtttttctttctgcttttgtttctctgctgtaaattggaatacaatcatcactccaccaagtaaaagaattccaaatgctctcatttctttcactggcttccaggataattttcttccatctacctgatctggcaatatcaggtaatccttttcccgctgttcctgatctgctttttctacttcctgggatatctttttcagaaccccctccttctttgacaacggtgtggaaaacaggtgtgcataaaattcacaggacattttttcctcatcatatcgaaggacagcggttaatttgacgagtgttccttcttccgtcagcttctcctgctttaaaacacctctgctgttcataacctcgtagttatcaagttcccatgacacgctgattcccgtatgtggaatttccataataagattcaggtctgacctgatctcatccagacttttgttttcaccaaggatctgagctggaagttcttctgccgccttagaaagctgttctccaatctcttcttttgcatacttcttttccgaaatctgaacctttatcttctctttccactcgcctgtctccatctggatgttttctgtcttttttccttctccctgtccttttctttccaaaatccggtttccattttcatcctgtgctaattgacgatgattatctgtgacatacactgcactaaacattacaattgacaataaaagaacaattcctgtctttttatagattccatattttcctttgtcaggctgaagtacttttttccacttcttgttaaatctcaatctgtagcaacctccttccaaacctgtatgctccaagataaagcacaagacaaatgctcattacgatacatccggtccatgtaccatacaggacacttaagaattcaccaaatgtcatcttcatgtagagaatcattataaatgggattacgctcatgatttcaaattccagctttttcgcagccaacatggtctgtatctcacgttctgtatcgatcttctctccgattgttctggccgcatctctgataatcgcaatggaatcccctccactgaccttagccgctgcataaactgtaataaaattcgtcacatcctcctgctttacttctgccgcaaattcattcaatacagttacaactgacagattcagatccagcttccttaccatctgaccatattcttttcgaatccttgtattcgcatcatacattccgatcagatcacgatttgtttccctgattgcattctctacagaatatcctgccttaagtgcccctgccattgtctggatactatctctgaactgccttctgaattcctgttcttttccgattgctttctcttccatccactctttcatgtataagaaccataacgggaacaggagaattgccggaagtattgattcataaaacaaatacaaaatcagaagaaatctcaccgtacattttatgattccgacagtatattcagacggtgtgatatcctgcagccaggagtttttctttattcgtgatttcatttttcttcataaggcatccctgtatctttccattcttcatcccctcctccttaaattcataaagaacctttgtctgaatccttccatcttcataaccttccacttctacaatctgcaaaacctttcttgtcttatctcgaagtcttccaagatgaatgataatatcaagtgccgatgcaacctgtctttgaattgcctgtaacggaagatcaatccccatcagcatcattgtttccagtctgtgtaacatatctgttggattattggcatgtcctgttgacattgaaccactgtgaccattcaacattgctgaagagatcatatctaccgtctcttctcctcttacttctcctacaacaattcgatccggtctcatacgaagtgctgacttaatcaaatctctgatggttacagccccttctccttctgcattcggtccgcgtgcttctaagcgcaccagattctgaactccctgaatctgtaactctgcattatcctcaatcgtgatcaggcgttctccttttggtatatagttcgacaacgcattcagaaaagttgtctttcctgctcctgttccgccactgacaaaaatattatattttgctgctaccagctttttcaaaaagttagcggcttcatcagttacgctgcctatacaaatcagctgttccatcgtaattgcttccgatggaaactttcggattgtaaggattggtccattcacagcaaccggattcaatacaacatttactcgagatccatccttcagccttgcatccacaatcggagaggcctcatttacataacggttcgattcgcctacaatctgttgaattacatccagtaatctctcctgagacaaaaaacacttcttagaccggaaaattcttccttctttctcataaaagatatggtcgattccatttaccataatctctgtaatcgaatcatcttcaagaagctcctgcagaacatccagtttacgaaaagagttgaataactcacgcccgattctgatcttatcactcaacggaatatattcttcatctgctgcctcatccaatactgtgcggatcagctcctgcagttcttcatcatccgtctccttcgtaaggtcaatttgttccaggatctgttcatacagctgctcttttctaatcatccttacgacttcctttctccgtccggaaattccgtaattttacttgcagatgcttctaaagcaacaggatttcttggctttcccattctgcgtcttaccgtcttcttaagaatctcgccatatcctgctgatctaagattctcttcgtactgattgagttttgcctttgctgcaccttcctcaatgtaaggcgtataaactttgctgcatcttcctaacagatcatacagaccgtctaccgtatctcccaaatcaagaatgatcactttgtaaatactcttctccagaatcagatccaaaagttgattccattcttcttttgtcacttctctgaaatcttgttctgcccggatcggtgcgatataatccaccccattcatatggctgatcaaagtactgatcttccataccggattgacactttcctgcttcatgtaatacagcagatctccaagattcattccggattcttccggcaggtaataatttaatcctgaatatccttccagattcagatacaacgtaggaatcgattctgaaagaactcgtcccatacgcatggcaaaccttgtcttcccgattcgatgaaccggtgaatagatcccaatcagaccatttacatttgctttcactgtctgcgatctgtctgagacaagttggatttgatgcgtctgtacttctgaattttcctgatctttttcctgaagtaaaagttccagcatactgctgacactttgataccggaagaatggaatctctgtgggacttctctcgttcggaatcttctcgccgatcagaagatacttctgtcttgccggaatctcatcccgatcttcttttccatactcttctccgatcagcagaatatttacctgcatactcttggctgctattttcagattctcaatatcatgaaatacatgaaactgaaaataaccggataatttttcagataatcttctgaacagattttctgaataactcttttgtgtatcacaaatcacaaaattctcagcagttcttcttactgctctttgctcaattgtcataattcgaaactttgctgcgatcatacagcctgaataaagaaattgtaccgaaggtccaacgcttcgatgcaaaagatacatcagtaattccccaattcactgatgctgcaacagatgattttctgttggtaagtgagattatatacgggcacttctgttttgtccataccaaaattaaaaatataatgtttttgtaaaaaactcacaaaaattgataccatgtaatgctataaagaagacaaaccccaggaattccaagggttccggatgtcaaaaaggtcatcggattcaaaccgacattaattgaagaatctgctggaagaacatatttgtttattataaaaatcaacgccattcctatagttgcacgtataaaaaacttgagaaaaaagtatcctgttttctttttcatttcactcttccaatctgttttttcttgatttgtaactgttcagagccaagcaaaatttcaaaaaacaggtataaaatgcttgcatttttaagactatttttgaaattttatttggcggatacgccacaccgacgaaatgcgtagcattttggaggttggctctgaacagttaccttgatttattttattttttccgtctcttttttattccttttgattccattttcaattctttatactcaaaaaagaaagcggataaagttcactgtaatcaagtaaactccatccactttctcttatctttttatttttcaggacagcttacaatcttctgtaaaacataacaactttattcctctgttgtttcctgctcagttgtctcagaaactgatccttcctctgatttttcagactcatcttcatcagagatctcaacttcttcaccgtcgatctcggcagaagcctttctcaccttcgcaacgctcgctacagtgtcattttccttcaggttgatcagttttacacctgatgtgattctgccgtaaacagagatatcagaacacttcatacggataataattccttctgtgttgatgatcatgatctcactgtcttcatctacagctttcattccgacaacatttcctgtcttctctgtgatcttataacatttcacacctttaccgccacgattctgacgagtaaattcatccatgtctgtacgtttacccataccacgctcagatacgatcagcatatctttgccctggctttcgatctgcataccgatcacaacgtcattatctgtcaggttcataccacgtacgcccatagaaacacggcctgtagaacgtacatctgtctcattgaaacggatacacataccgtattttgtaacgaggaaaatatcctctgtattgtctgtgatcttaacttcgatcagcttatcatcctcacgcagtacgattgccgcaagtcctgtctttctgacatttgcatagtcctgaatcggagtcttcttcacaagacctttctccgttgccatgaacaaatacttaccttcttcatactcacgaagcggaataatcgcagtaatcttctcttccggcatcagctggagtaagttaatgattgctgttccacgcgcagttcttcctgcctccggaatctcgtaagctttcagtctgtagacacggcctgtgtttgtaaagaacataatgtaatggtgactggttgtaataaacagttctcggatgtaatcatcctccagagtctgcattcccttaatacctttaccaccacgattctggctcttgaatgtgtccatagacattctcttgatatatccgagttttgtcattgtaattacgacattctcgcgcggaatcagatcttccatggagatgtcaaattcatcaaatccaatcttagttcttctgtcatcaccgtatttctcagcaattacaagaatctcttttttgatcacaccaagaagaagttttttatcagcaagaattgctttatactcttcaatcttcttcataagctctgcatattcagcttcaatcttctcacgttccaaacctgtgagtgcacgcagacgcatgtctacgattgcctgtgcctgggcatcactgagtccaaagcgtttgatcaattctgcttttgcttcctgaacattcttagaaccacggataatgcggatgacttcgtcaatgttatccaaagcgatcagtaatccttccaggatatgagctctctcctgtgctttattcaggtcatactgtgttcttcttgtcacaacatcttcctgatgacgcaggtagtactgcaacatctcaagaagattcataaccttcggctgattatcaacgagcgccagcatgatcacaccaaatgtatcttgaagctgtgtatgtttatataactgattcagaattacattcggattcacatcacgacgaagctcaatacagattctcataccttcacggttagactggtcacttaaatcagtgattccatcaatctttttatctcttacaagctcagcgatcttttcgatcagacgtgctttatttaccatatacggaagctcagtaacaataattctgttctttccattctgcattggctcaatgtttgtcaccgcacgcactctgatcttaccgcgtcctgttctgtatgcctcttcaattcctcttgtaccaaggatctccgcacctgtagggaaatccggtcccttcacgatttcaaggatttcctcgattgtcgtctcttctttatctgcaatctgatcatctatgatctgaacaactgctgaaataacctcacgcagattatgcggcgggatattcgttgccatacctactgcgatacctgatgttccatttaccagaagattcggaaatctggacggaagtacagtaggctccttctctgtttcatcaaagttcgggataaaatctacggtatttttgttaatgtccgctgtcatctccatggaaatcttactcagacgtgcctctgtgtaacgcattgcggcagcgccatcaccgtccactgaaccaaagtttccgtgtccatctacaagaggataacgtgtagaccactcctgtgcaagattaacgagagctccataaatcgagctgtctccatgaggatggtattttcccatcgtatcaccgacaatacgcgcacatttacgatgcggtttgtccggtccattatttaattctatcattgagtacagaattcgtctctgtaccggcttaagtccgtctctaacatccggaagagcacgggcagcgattacgctcatggcatagtcgatgtatgaagtctccatcgtctttttcagatcgacttcatggactttgtcaaaaatattgtcttccatcacttgtctccttttttctagggtcagtctatcatattcaaaacctggctgggtttcgcgttcttacgctccacaccagctcaaaaatctgacgattttttcgctgggttggcatttctaatgccaacccagacaactacgtccaggtctgctttcgagtaaactcgaatcagccctgcccgaagttgcctgttgtgtcgctataactactatatatccaagttttgtacatactttgcgttttcttcgatgaattctcttcttggttctactttgtctcccataagggttgtgaaagtaagatcgagctcggaagaggtctcatcatccatcgttacgcgcagaaggattctgtgctccggatccatagttgtctcccaaagctgctctgcatccatctctccaagacctttgtaacgctggatcttattgttgctgtcacgaccaacttctgtaagaatctggttcagttcgtcatcgctgtatgcataccataccttcttgttcttctccagtttatacagtggtggctgcgcaagatatacatatccctctttgatcagatccggcatgaaacgatacaaaaatgtcaaaagaagtgtactgatgtgcgctccatcgacatcggcatcggtcatgataatgatcttgtgatatctcagcttactgatatcaaaatcttcgtgaattcccgttccgaatgctgtgatcattgccttaatctcagcatttccgtaaatcttatcaagacgtgctttctctacgttcagaatcttaccacgaagtggcaggattgcctgagttgcacggtctctggctgtctttgcagaaccgccggcggaatctccctcgacaatatagatctcacacttggacggatctttatctgaacagtctgccagttttcccggaagggacattccctcaagagctgactttcttcttgtaagatctcttgcttttctggctgcttcacgggcacgctgtgccataacagacttttcgatgatcatctttgcaacacttggattctgctccaggaagatctccagctgtgttctgacgatattatcaacagctccacgtgcttcactgtttccaagtttctgctttgtctgtccttcaaactgaggatcctcaatcttgacactgacaatcgcagtcagtccctcacggatatcctctcctgaaagctgctcattctctttcagcagcttatttttcttgccataatcgttgaataccttagtcaatgcacttctgaatcccgcaatatgagtaccaccctccggcgttgtaatattatttacaaaaccgtaagtagtctcattgtaggagtcattatgctgcatagcaacctcaactgcaacattatctttcataccttcacagtaaataatctgctcatagagcgcagttttactcttgttcaggtatgttacaaattctttaataccaccttcatagtggaatatatgctcatggatctcttcctcacgaagatctcttaagtgaatcttcaatccctttgtcaggaatgccatctcacggaaacgctgtttcagtgtattataatcaaatactgtttcctcaaagatttccttatccggaaggaaagtaacctttgttcctctcagctccggctcacattctctgtcaactctgagtttatagcatactttaccacgctcataacgctgtttataaatcttgccttcgttggcaatctctacttccagccactcagaaagagcattaacaacagatgcacctactccgtgcaatcctccggataccttgtaccctccaccgccgaatttaccaccggcatgcaggattgtaaatacaacctcaactgcaggaagtcctgccttatggttgattcctacaggaattccacgcccattgtctgtgaccgttatcgaattgtctttgttaatgtctacctgaattttatcacaatatccggccagagcctcatccaccgcattatctacaatctcataaaccagatgatgaagtcctctgacggaagtgctgccaatgtacatacccggtctttttcttacggcttccaatccttccaaaatctgaatctggtccgctccgtattcagcgtcaaattctgtacctgatgcacccattcttaaacctcctagttttcttttgctacatgtccacttttcacatggaatatcttgttgatagaaaatctatgatttacaaactcatccagtcccgtacaagtaatcaccgtctgtatatcatgaatactatccagtaaatagttttgcctgtttttatctaattcagacaaaacatcgtctaataacaggatcggcgtatccccaatgatccgcttcaccagttcaatctcagctaatttcagcgacagcgcagctgttctttgctgtccctgagaaccaaattttctaatatccaaatctcctgacaggaaacacagatcatctctatgaggacctacagacgtacttttcatccgcagatccctctccctgtttttcttcagagcctgctccatcgacatctcaccaatacttgattcataagtcaatgacagctgttctttcccgcctgtcagacggaaatgaatctctgaaataatctcattcacctgtcgtacaaattcttttcttctttccaaaacctttgttccataagcagccagctgcatatcccagatatccagtgtctccagcaaatgctgctggttcgagccatagatatccttcaaaagtgaattacgctggttaataatacggttatagttcgaaagattattcagatagatcttatcaagctgggaaagctcaagatcaataaatcttcttcttcctgccggaccctctttgataatattaagatcctccggagaaaagaaaacaaaatggacaataccgaataactcacttgcacggcgaatcggtaccttatcgattgcaattcccttcggactgtttttcttcaggtgcatatcgatctggaaaatgattccctttttctcaactactgtctccagatgggattcatcatgcccaaactgtatcatatcccgatccttcgttcctctgtgagatttcgtcgttccagacaaatacaatgcttccagtatgtttgtctttccttgagcattgtcaccgtacaaaatatttgttttcggatcaaaggtcaaatctaataaatcataatttctgtaatttttcagctttaaagacttgattatcataatttccccgccatcacgttataacacgagcgagaaaacctctcacatgttattctacacgttttttaattatttttcaatttttatttcatttccatcaaaagaagctgtatcgcccggataaagctttcttccgcgtctcgtatcaatttctccgtttacaagaacaagcccgttctgaattacgtccttagcctcaacaccactttcaactaacccggctgccttgagcgcctgaccgagtttaatgaattcatcctgagggcgcagtttgattatttccatttcttatcactccttaattaatttttatcagtgtttttgatctttatttttcgtttaaactttttaaatatttttaaacttttaattttctagattttgaaaagtcaaaaaattgcagagcagggcgtctgctccgcataatccattattttctgagtttagacagctgcattaaaattgactggaagaatcagataaatgtaagactgattctcgtctttgataaagcaaggtgcttttgcattcataaaatacaagtctacttcttcatcttcaatcacacgaagtgcatcgatcaaaaactttggattaaatccaatcatcagatcttttccgtcttttgtacagaaaatcagttcatccatagatccaatctgtgatttgatcttcaactccattgattcattcttgatgtcaatgataatcggctttttgtctccctctttgataagcagagttgcacgatcaatacaatctaacagttcttttttattcacatgtactcttgtctcataatcactggacagcatctgatcaattcggaaatattcaccttcaatcagtctggaaacaaccaatgttctgtcaaattcaaaaacaatatgattttttgtaaacgaaatctcaacttcagcatccgcttcaccgccaataatcttgctgatttcctgaagagtttttccaggaacaattacttttctcggctgataagcatctttcagttcgattttccggattgaaattctgtgaccatcaagagaaaccactctgagaacatcattgtcaatctcaaaaagttctcctgtcatcatcttgttcgtatcattgtcagcaattgaaaaaatagtctggcgaacaacttctttcaaagtaaactcggaaatagtaataaaatcttcacgctcaatcgccggaagataagaaaaatcatctcctgactgggctgcgatattaaatttcgctttttcgcaagtaataattgcctgattgtcagattctgtttcaataacaacatcattgtctggaagtttacggacaatttctgaaaaaatctttgcatttaatgcaataatacctctggaatcaataattccatcaattgtagtttcaattccaagttccatatcattggcagtcagtttgattacatccgttgttgcatcaatcagaatacattcaagaataggcattgttgttttagagggtactgccttggaaacaatactgactccttttacgagattcgattttttgcatatgattctcatgttgatgattactcctttcaggtttcaaggttacagttgatatgtggataacgttttttcctcgcgtaatttatgtatatttatataaatcgattccgtctcctccgccttagggggtgtggataagtggataagtacctgcagccctttaaaatcaagggtttgcgggtttggataactatgtagattacagaaaaataacgtgttgaaactgtggggaaaaaaatttggcaaaaaatccacatttttgttatcccaacgttattcacatagaaatctacaggttttctacaaagttatccacaattaacgcgaaaaactgacaagttattcacattttatagagttatcttccttatacaggattgattttcttcttaattatattcacagtgttgtttaaagcttcatctgtcttcagatcattctcaattttgcgtacaccatggctaatggaagcatgatctttaccaccgagcagggcaccaatggattttagtggtgtatcggtcatatttctgcacagatacatgacaatctggcgtggaagaacgatctcagcgtttcgttttttaccttttagttcagttaccggtacattaaagtgttcagaaactacatccatgatcagttctggtgaaactgcacgggtatcatccggtgagatcatatccttcaaggcctcagcagccaaaggaatgtcgatcggtttattctccagattagaaagagcgatcagtttattcaaagatccttcaagctcacggatattggatttaatattattggcaatgtactgcataacctcatccggaatatgatatttctcaagtccgtcgagttcttctttcttacgaagaatcgccattcttgtctcatagtcaggagaggagatgtcagcaatcagaccccactcaaaacgtgtgcgaagtctggcttccagtgtctcaatgtccttcggaggcttatcactggagatgataatctgttttcctgacacatgaaggtgattaaatgtatggaaaaattcttcctgtgtactttcttttcctataataaactgaatatcgtcgatcagaagaacgtcattattgcgatatttctcgcggaatgtggtcattgccaattcatttccgttcttacctactttaagagcatcgatcagttcattcgtaaaagtttcacttgtgacatacagtacttttttggagggatcatgttccaaaatgtaatgtgccacggagtgcatcaaatgggtctttccaagtccaacacctccatataagaagagagggttgtagatctctcccggagattcggcaactgcgagggaagcagcgtgagcgaaattgttgttgcttccaacgacaaatgtgtcgaacgtgtactttggatttaagtttgccttttcataaatcgcatttacacgggtcttctggacggaagattctttcttttccttaataactttcgggctgtcggttacaaattccacttcatattctgtaccggttacttcggcgatgcagaccttaaaaggaagcagatatttatcttgaatatgttcaagactcgccttcagtttgacgagaatatatacggtattgtccttgacttcataaacagtaagtggtgcaatccatgtagtataagaaatattggatgagcaatattccagcttcatcttgtttagtacctgatcccagttttgttctacaatgttcatcgatagtaactcctaattttttaaaattataatggaaaggttgaaaatccagcgcaaataattcaggacttatccacattcaactcctgattatggcttttagggcagacttccccctacccaaatacaatgttttcagcaactgtttgttaaaaaagtgaaaaacagccactttttattaacttcgtactaaaataatgtggataactctaaaaatggtagagtctctccattacattctacatcaaaaaagctgtagaatcaatggaaaaacagtgtgtataactttatcaacatcttaaaacgttgataaatatggttttttatgaataaaaaaaattttatcaacacgatatttagtggttttccacaggttatacagaagttatccacatatgttgataactttgtggataacttctgtataactgttgtataattatgtgaaaaaatagttgtatcccttgatatataagggtttcgaagaactgtgaaattattcacagaaaatgtgaaaaactctttaaaatgaaaaaaggctagaaattgagggaaagattgttgataaagcttgactttatgcggttttccctctataattaagagcagtgtcttttaatattgaggcgcagtaacgaagttaattttgtgaatacttttattataaggtatatcaggcataagggaggtgtaagaatatgaagatgacatttcagccgaagaagagatcaagatctaaagttcacggattcagagcaagaatgagcacaccaggcggaagaaaagttctggcagcaagaagagcaaaaggaagaaaacagttatcagcataggccgcatatatgtggccttttcttctatttaatattaaatgataacaggatttttgttatctggaatgaagaggatattgatgaaattttctgagtctttaaaaaagaataaagattttcagtcagtctacaggaatggaaaatctttcgctaataaatgtcttgtaatgtatataatcccgaacgaactgaataagaaccgactgggaatatcagttagtaagaaggttggaaacagtgtggtaagacatcatcttacccgattgatcagagaaagttacagattatcagaagaacatttccgatgtggatatgatatagtagtaatcgcgagaacaagtgcaaaggataagaattatcatgatgtggaaagtgcactgatccatctcggaaagcttcatcacatatatgtctgataagacaatgataaggaagtggcgcagatgaagtatgtcttgttatggatgattcgtttttacaggaaatatctgtccggaatgaagggcggatgcacttgtaagtattatccaacctgctcacagtatgggttggaagcaatcgagaagtacggagcactcaagggaggggctttggcggtatggagaatcctgcgctgtaatccattttcaaaaggtggatatgatccggtaccttaaggaggataagtaatggaagtatacggacttttggcttcaggttatggagactggccgattatcaaacagattgcctggcttttaggtcaggtaatgaatggtatcttcaatgtacttagcaagattggtattgagaatattggtgtttgtatcattattttcacaatcattatttatacattgatgattccgcttacaatcaagcagcagaagttttctaagatgtcagctgttatgcagccggagatcaagaaaattcagaaaaaatacgaaggaaagaaagatcaggcttcaatgatgaagcagcaggaagagatcaatcttgtttatgagaagtatggaacttccatgacaggtggatgcctcccgatgttgatccagatgccgattctgttcgcactgtatccggttatccgtgatattccgacgtatgtaaaaggtgttaaagatgtttatatgcctgtgacagaagcaatcatgaatacaaatggcttccagaagatcatggagacgatcggtgaagcaagcccggttcttatgaacccaaaggcttatgattattctcaggcagatacaattgtaaatgtactttataaattccaggattctacatggaatgcgctgatggaaaagatgccgagtatcacggatcttgcacagcagacaatggataaggttactcatctgaacagtttccttggaattaatatcggagagcagccgctgacacagctgacaactgcattccacaacggatccgttgtagggatcatccttgcagtacttattccggtacttgcaggtctgacacagtttatcagtgttaagcttcagccacagccggcaggagatgacaaagataacccgatggcaagctctatgaagacaatgacatacacaatgccgctgatctcagtatttatgggattcacacttccggcaggtcttggtctctactgggcagcaagtgcagcagtaagatgtattcagcagcttgcaatcaacaaatatctcagcacaaagtctcttgatgagatgatcaaagagaaccaggagaaagcacagaagaaacgtgagaaacacggagctcctgcaaaagagatcaataagatggcaacaacaagtactcgtaatgtgggtactgttacaaaaggaaaatctggaatttctgaagcagagagagaagaaaagatccagaaagcacagcagaaggctcagaattctaagccgggaagccttgcttctaaggcaaatctggtaagccgttataacagcggacagcagacaaaccagccgaaggcagaagatgagagcagctccaaaggaaaaaagggcaagaaaaaataaaggaagattcgtaactcctaaccgttctcttaaaaagcaggagacgggtcaggatttgaagatggaggaatcgggatgaacggtagtatcagagtatcggcgaaaacagttgatgatgcgatcacagaagcattgatccagcttggtgtaacaagcgacagactggagtacgaagtaatcgagaagggaagcgcaggattcctgggaatcggaatgaagcaggcagttattgaagcaagaagaaaaccggaaccgaaagaggagaaggtagaagagcctgtagtagaagaacctgtgagagtagagccaaagaaggttgaagcagttcagcctcagaaagcagctgcagaaaagaaagcggatgaacctcagaaggctgcttttgaaaaagctgtagaaaaagaagtaaaagaggaagttaagaaagagacaaaacttgtagaagttcagcctcagacaatcaaagcagtagaagatttcctcaagaatacaatgaaagccatggacatggaagttgagcttaagactgagatcgatcaggacggtgcactttgtgtagatatgagtggagagcacatgggaatcctgattggtaagagaggacagactctggattctctgcagtatcttgcgaaccgtgtagcgaacaagcatcaggaaggttatgtaagagtaaagcttgacacagagaactatcgtgcaagaagagaagagactctgagacaccttgcaaagaacattgcacataaggtaaagagaaacagaagaccggtagcacttgagccgatgaatccttatgagagaagaatcatccactcagcactgcagtcagatccttatgtgatgacacacagcgagggagaagagccgttcagaaaagttgttattactttgaagaaataatactgtttatgaatcggaagcgaaaggacgtttacgcttcacggatactttcgtgaggtgtggaacgtccttttttctatgtaaagtatagaaaaaaggaaataatgtaaagagaaaacagaaaggaaataaggcatgaatcaggatacgattgcagcgatttctacaggtatgactaattcgggaatcggaattgtaagaatcagcggaagtgaagcgctggagatagcagatcgtgtatataaagggaaagaaacgattacagaagtgccaacgcatacgattcattatggacatgtaatggatggagatgagacagttgacgaagtacttgtgatggtgatgcgcggacctcgcacatttacaggagaagacacagttgagatcaactgccacggtggaacttatgttgtaagcagagttttggagacggtcttaaaggcgggagcaagaccggcagagccgggagaatttaccaagagggcattcttaaacggcaagatggatctgtcacaggcagaggcggtcattgatgtgatcacatcagaaaatgagtatgcgttacagagttcgatcagccagctcaagggaagtgtgaagaacaggatcaaagagatccgtgagaagatcatttatcatacagcgtttattgagactgcgctggatgacccggagcatatcagtgtcgatggatacggtgaggtgctaaaggaggcagcagaagaggtgatcgggcagctgaaagaactgattgattcctcggatgatggaaggatcatgaaagagggaatccagacagtaattcttggaaaaccgaatgcaggaaagtcttcacttctgaacattctagctggtcatgaccgtgcgatcgttacagatattgaaggaacgacaagagatgttctggaggaacaaatccgtctgcagggactgactttgaatatcatagatactgccggaatccgtcagacagacgatatcgtggaaaaaatgggtgtcgataaggcgaaagaatacgcaaaagaggcagatcttattatttatgttgtagatgcatcaagaaatcttgacgaaaatgatgaaaaaatctttgatttgatttatgataaaagaacagtgattctgcttaataagtcggatctggataccgtagtgacagaagagatgatccgcgaaaggatttcacaaaaaggtgttcagaagcagattcctgtgattgcgatttctgcgaaggaagagcagggaatcaaggaacttgagaacaccgtgaaagcaatgttcttaaagggagatctctcattcaatgaagaggtttatattacaaatgcaagacagaaaaatgcattggtcaatgcgagagagagtatgaagaaagtcattttcagcattgatgccggcatgccggaggatttctattcgatcgatctgatggatgcctatgaatcacttggaaatattaccggagaatcaataggagaagatttagtaaatgaaatattcagcaagttctgtatgggaaaataaagatgaatatgatgttgtcgttgtaggcgcaggacatgcgggctgtgaggctgcacttgcgactgcaagacttggatttaagacagtgatctttacggtcagtgtggacagtattgcgctgatgccatgcaatccgaatatcggaggaagctcaaaggggcatctggtcagagagttggatgcacttggcggagagatgggaaaagtcattgaccagacatttatccagtctaagatgcttaacagttcaaaaggtcctgccgtgcattcactgcgtgcacaggcggataaggcaaattatagtaaaacaatgcgtcaggtgcttcagaaccaggagaatctagatatccgtcagatggaagtgacagagatcctggcagaggatgggaagatcacaggagtacagacgtactcaggcgctatttaccgctgtaaggccgttgtgctctgtacgggtacatatttaaaggcacgctgtatttacggcgaaataagcacacatacgggccctaacgggcttcagagtgccaactacctgacagatagtctgaaagcactcggaattaagatgtatcgattcaaaacaggtacaccggcgcgtattgataagaatacgattgatttcagcaagatgcaggagcagaaaggagatgagagggttgtaccgttctcatttactacagatcctgagagtgttcagatcgatcaggcgtcctgctggctgacttatacgaatgagacaacacatgagatcatccgtgacaatctggatcgttcaccgctttattcaggagcaattgaaggtacgggaccgagatattgcccgtctatcgaggataaggttgtgaaattcccggacaagaaccgtcatcaggtgtttatcgagccggaaggacttgagacgaatgaaatgtatgtcggtggaatgtccagttcacttccggaagatgtccagtatgcaatgtacagaagtgtaccgggactggaacatgcgaagatcgtgcgaaatgcgtatgcgatcgagtatgactgcattgatgcgagacagttgaagagtacattggaattcaaagagattgaaggtctgttcagtggtggacagtttaacggaagttcaggttatgaagaggctgcttcccagggactgatcgcaggaatcaatgcggcgagaaagctgcagggaaaagaaggtatcgtgatcgacagatctcagggatatattggagttttgatcgatgatcttgttacaaaagagagtcatgaaccatatcgtatgatgacttcacgcgcggagtacagactgcttctccgccaggataatgcagatatgcgtcttacaaagattggttacgaagtgggactgatcgatgaggagagataccagaaactgctgaaaaaggaagagatgatcgagaaagagatcgagcgtgtggagcacacaaatgtaggtactacagaagctgtacaggcattgcttgaatcctatgaaagcacaccgctgacctcaggaacaacacttgcagagctgattcgcagaccggagttgtcttatgagaagattgcaccgatcgataagcacagagaagaactgccatatgatgtaaaagaacaggttgatattaatatcaaatatgatggttatattaagcgtcagatgcgtcaggtagagcagtttaagaagcttgagaacaagagaattccagaaaatattaattatgatgagattcagagtcttcgtcttgaggcaaagcagaaactgaataagatccgtccgtcgtcaatcggccaggcatccagaatctcaggagtttcaccggcagatgtgtccgtacttcttgtatatttgagcagtaaataaatggttagttaaatcaatacatgagaatttaaaaatgctatattaatattccgcggaatggtattgtaggattggtgaaactgttccgttggaagtaatgattggagaatagagtgggagagaacgcacagagtaaatttgatctagaattagaaaaaatcggaatcacattaaatgagcagcagaagcagcagttcgacaagtattatgagatgctggttgagtggaataaagtgatgaatctgacagggatcacggagtatgatgaagtgaatctgaagcactttacagacagtctgacaatcgcaagaacacaggagatgcagaagatccagagtgtgattgatatcggaacaggagccggtttcccggggattcctttgaagattgcatttccgcatctgaaggttgtacttcttgattcactgaataaacgaattaagttcttagatgcggtaattgaagaattaggattggaaaatatcagtacaattcatggaagagcagaagattttgcaaagaaaaaggaatacagagagcagtttgatctctgcgtttcaagagctgttgcgaatctgtcaacattgagtgagtattgccttccatttgtagctgtaaatggcagttttgtttcttataaaagtggagattctgaagaagaaatccatcaggcaaaacatgcaatttcactgttaggtggaaaagtaaagaatgtggataagttccaattacctggaacagacatgggtcgtgcacttgttgaaatcaaaaaaacaaagcagacaccgggaaaatatcctagaaaagcaggattaccggcaaaagaaccattaaaataagcaaatataggaggacctgtttactggcattctggtgaacaggtcttcatttttgagtgtattgttgaaaaatgccgaaatagtcagaaaataagtctaaaaagaagatatcctcaaaaaaagaaggagttatccacattttccacatgagatattcactctgtgtggatatctcatgtggaaaatgtggataactctaatttttagaaaaaatatgatgtgagtaaaatttctaatttatgcgatattctattcacattcttcagcgtctgacaagaaaatttctacattttcaatgaattcgtcacatttttcaatatgaggaagttgtttggtcttggccattcctgcaatttcaatcgaaggaagatagttctgatattcactggctgccagagaattttcaggattactatttcctacaataatggagatgctgttatttaatttattcagacagtgaagaacatttgcattcgtatatctcgtcttttgacaggcgaaaagatatttggaatttgtatgttctttgtgtgctgcttcaaagtaggtgagaatatctttttcactaatttcattctgagtataataagaagagcagagggcatgagcaattgtcttcttatttacatacatattatagataaatgtacccagaataggagaatagaggatattctttatgaatttactacgttttgtaggaatctttgccaagcctaccaaattcggtggatttatcataataactttatttataattgtttcatcgtttgcacaggccatcagtacaaatggacaggattcaccggaaacaattacatcagttttttctccgataatatgtttgataaagttcgtgattaattctacatacagataattagtatatgttaatcccggacggtcggaacaaccgcagcctaaaagatcaattgtatatacagtatgggacttggcaagttccgctatattgtttctccattcataggaagaagaacatacattgagattatgcactaaaagtaaaggtgatccttcaccagttttcttatatgcgattttgccaaatctccagttatagtattcatattcatcagaattgattaatttatcagcagttgagatatattctaatacacggttggcaatatgcattgcaccgagagaaactcctgctaaagtagtaaaaaaagttagttttttcttgatactcaaattactcaccttccttattataatagtggttttttatataaaagtaagagtttgaattaaaggaaactcttactttattatactacattcttaaattcaaataaagcgaaaaaatcttaatgtttaattatagaagaagtggcttatctcttaaaaatgtttcacgtgaaacatttttgatctgcacaatcgaatccgcaccctgcgcgtgtaatatagttatttacgaaacgtagtactagaaatagaagagaaaacacaatgtttcacgtgaaacatttgattagttctagattaatgaaaagaaaggtgatataataatgaatgtccgagagaaaggagtaaaaataatgggtagagtgatagcaattgcgaatcagaaaggtggagttggtaagactacaacagcaatcaacttatcggcctctttagctagttcgggaaaaaaagtacttgctatagatatggatcctcagggaaatatgtccagtggattgggcgttgataagaatgaggttgaaaagacaatttatgaacttattattggtaagtgtaaaattgaggagtgtatttgcaaggaaccaatagaaaatctgagcgtagatgtgcttccgtcaagtattgatttatcagctgctgagattgaactgattggcgttgacaataaggaatatattttacgagatgaagttgaaaagataaaagataattatgactttataattattgactgccctccggcattgagcatgcttacaattaatgcaatgactacttctgactcggtgattgttccaattcagtgtgagtattatgcactggaaggattaagtcaattgatgcatacgattgaacttgttcaggatagactgaatccgaaacttgaaatggaaggtgtcgtatttacaatgtacgatgcaagaacaaatttatcattacaggtagtggaaaatgtaaaggataatctgaaccaaaatatttataagacaattattccgagaaatgtccgactggctgaagcaccaagttatggactcccaatcaatctgtatgatccaaaatccaaaggaacagagagttacatgcttttagcagaagaagtgattaataaaggagaataagtatgcctgtgaagaagagcggacttggaaaaggattggatagtctaatcccaaacaaaaacgttaaaagcgcaaaaccttctgtaaaagcggacgagaaaaaggcaactccgaaagaagaaattttagaggcaggaccgatcatggtgaaaataaataaagttgaaccaaatcgggatcagccgcggaaagattttgatgaagatgcattgatggaacttgcagattcaattaagcagtttggtgtattgcagccgattcttgttcagaagaagaaggactattatgagattattgccggtgagagaagatggcgcgcagcaaagctggcaggattgaaagaagtgccaattatcgtaaaagaatttacggagcaggaaatcgttgagatttctttgattgaaaatattcagagagaaaatctgaatccgattgaagaagcaatggcttataagagactgttgaaagaattcaacttgaaacaggatgaagttgccgaacgagtgtcaaagagcagaactgcggttacgaactcaatgagattattaaaactgaatgaacgagttcagcagatgatcattgacgatatgatcagtacaggccatgcaagagctcttttggcaatcgaggatgaagagcagcagtacatgcttgccaataaaatctttgatgagaagcttagtgttcgcgagacagagaaactggtgaaggctctgaagaatccaaaaaaggaagaaaaaaagccggaagtagaaaatcagttcgtatacacaaatcttgaagagcagatgaagagtctgatcggtacaaaagtaagtgttcacgcgaaagcaaatggaaaaggaaagattgagattgagtattactcaccggatgatctggaaagaatctatgagttgctcatgacaatacagcataactaaaaaggagatggtagaagtgactggagtatttggcaatctgggaattgatccattctacgcatttcttattttacttattttgcaggtagccttgcttgtcgtacttgtgttagtgtatgataagtataaacacctggaaaaagtatttaatacctttatgaagggaaagaatgggaaatcactggaggaatccatttttgaacggtttgacaagatcgacgaagtcgtagatcaggtagaagaaaaccgtgaggagattgcagaactttataataaaatgagaacgcattaccagaaagtcggaatcgtaaaatatgatgcattccatgaaatgggaggcgaattaagttttgcaattacaatgttagatgaaaacaatactggatggattttaaatataatgcatagtcgtcagggatgttatgcatatgtgaaagatattgtaaaaggtgagagtacaattcagctggcagaggaagaaagagaaagtcttgagaaagctatttttcaagaaaataaatagtaaaaaagaaattagacaggaaagggtaaataacatgttagacatcaaatttgtaagaaataatccggatgtagtaaaacagaacatcaaaaataaatttcaggatgagaagcttccacttgttgatgaagtaattgaactggacaagagaaacagagaaatcaaacaggaagtagaagcacttcgcgcagagaagaacaaagcttctaaggaaatcggagcaatgatggctcagaaaaaaatcgaagaagcagaagctctgaagaagaaagttgcagagagcaatggacgtatcaatgaactttccgaagaagagaaagaagtagaagataaactgaaaaagaacatgatgattatcccaaatatcatcgatccatctgtaccgattggtaaggatgatagtgaaaacgtagaagttgagagattcggtgagccggttgttccggatttcgaagttccatatcatacagagattatggagtcattcaatggaatcgatctcgatgctgcaagaagagtagcaggtaatggtttctattatctgatgggagatatcgcaagacttcactcagcagttatctcttatgcaagagatttcatgatcaacagaggattcacatattgcgtcccacctttcatgatcagaagcaacgttgtaacaggtgttatgagtttcgctgagatggatgctatgatgtacaagattgaaggagaagacctttatctgatcggaacaagtgagcattctatgattggtaaattcattggacagacactggagaaagatcaggttccacagactctgacgagttattcaccttgcttcagaaaagaaaaaggtgctcacggaattgaggagcgtggagtttacagaatccatcagttcgagaaacaggaaatgatcgttgtctgcgaaccggaagaaagcaaagaatggtatgaaaaactgtggaagaatacagtagatcttttccgttctatggatattccggtacgtacacttgagtgctgctccggagatcttgcagatctgaaagtaaaatctgttgacgtagaagcatggtcaccaagacagcagaaatacttcgaggtaggaagctgctctaacttaggagatgctcaggcaagaagacttggtatccgtatcaaaggagagaacggaagctacttcgctcatacattaaacaacacagttgttgctccaccgagaatgctgatcgcgttccttgagaacaatcttcaggcagatggttctgtaagaatcccggaagttcttcagccatacatgggtggaaacaaagaaattacaccaaagaacaaataaagaaatataaagcaaataaaatatgcatcagtatttaaaagcaattggatttgaaaatattcaaacaagaaaagatctgaaaaagctcttaaaagacgtagaagagaattttacgcatcagacaattgtatcctacagaccgggcgaagatttctgcgaattccagaaagagttcggtcaggatgtagggatcacactctgcggagaacttgatgatgaagaacattttgaagctgcatattatttcccatattttgaggggagcggagttacaacttatgcagaaatcgatgtgcagagaaagattgagaaagaacagtatgttggtctttgtgaggattccaagattggaatcagtctgatcttcacactgcagaatggtgtggaatatatgcgggagaaacaggccggtcttacaaaggatgtgcagacatctgtaacattttcaggattggcacaagatggaatgattctgcttccggtcaataaaaatgagcaacagattttaaatgaaaagcgtgcgtcagatacaagaagagaattgatgaacgcagcccgcaagggagaccaggcagcaatcgagacgctgacatttgacgatatggatctctattccaaggtgtcaaagagattggcgaatgaggatgtattttccattgtggatacgtatttcatgccgtttggagcagaatgtgatatgtattcgatcatgggagaaatcctggcggtgagagagaggatcaacagaatgacaggtgtgagattgtatcagatgcgcctgaatgtaaatgaactgacatttgatatctgtgttccggcagattccgtgatgggagagccggagatcggaagacggttcaaaggtacgatctggctgcaggggtatattaatttttaaaaatgaagagaaattgttgctgagtgcacgcagtgtgaaaaggaatgggaaatccacatccggaatgtgaaaaacattaaataaatgtggaaaaaagattttatttaacagaagaatgtggataacgaaggcaccatctctggctgaaaagtaattcggtcaggagatggtgtcttttacaattcgtgccatttttaccatgattcgtgacagaagaattgaaaataacagcgctttttttataataaaaatgtaacggttcagagccaacctccaaaatgctacgcatttcgtcggtgtggcgtatccgccaaataaaatttcaaaaacagtcttaaaaatacaagcattttacacctgttttatgaaattctgcttggctctgaacagttacagattacgagaaaaaggaggcagaataatatgaaaaagcgaacaattcttttagcatttattatatcagcagttgcagttacatcaggctgttcagcgaatgaaccaaagacaggtgaggtgaaacaggaacagacaaaaacagaaagcgtaagctcaggagtaacgataaaaccgcttaccaaaaaggcaattgatgagaatccttatatggcaaaaaatgatgcgaatatccaccatgattgttataattcagattcaacagatgaggtactgcctgttggtatttacccagaaattaatgtttcttatgaaaaggtgaatccaaatgcgtctccggcggtattttttgacaattatggacattcagttgttccgttgttgggaggacttgcaattcgtgatatcaatgcagaagaaacacagacgatcggatatttctcaccaaaacagcatgacggtggaggatatgtgatacaaagttcctattcctttgttgatgaaaataatcgtctggtgtgtccgacaagcaacaatcatgtacttatgttgaaagcaacagacgaggaaggaaatgtgctgccggaatttgagaaagtgctggatattgatattaaagcagcagcagaggcaattaccggaaagacattggatcagaatttattatccgtagtgtttgattatgagggaaatctttggtttgcaaccggcggattcagaatctatccggaacgtcagcagcaaggtgcgatgggatacatttccagagacgcgatcaacgcaattctgaatggagaagagattgatctgacagcgtctacttttgtatatgaattaactcctggagaaggggcagaaaatggaatagcttcttcgaaagagggtgcagtcatcttaacaaatcagaactgctatctactgaaagcagataatggtgtacaggtagaatggtgtactccgtatgaaagtgcaggggcaaaagacagcaaagaaggtgatgaaacgaccggaggcggtctggcgtggggaagtggatgttcgccatcactaactagcaatctggtcatgtttacagataatcagaatccggtgaatctgctggcattagatatgaagacaggtgaaaaggttgcaagcacgcctgttattgatgagctgccggaagaaatgcaggtatccgtagaaaattcagcaatcgtatatgataacagtgagggtacagtcagcacaatcgtatgtaactggtttggagcaggaagtgcgaagcttgcggacgcagataacgattcatctgtacagacatatgaaaatatctatgatgtaaactggctgcagaaaggaaataaaatggtcatgccgggagttgagcgtgttgatacgatcaagacagatgacggatatgaaatgaagagtatctggtgcagagatgatatccgggatacatcgatgatgaagctttcaaccgcaacaggatacatttacggttatgttcagggcttggacagtggcatgtggcagtttatcatgatagattttgagaccggtgagactgcattttcaatggatgtgtcagacaaaccaggatataacaatatggcaatcggtatgtatgcgggaaacagtggaaatgcattatactgtccaacaggatatcttgaactcctcagactgcaggatcggttcgtatatcttccggaaatgccttaccgaaaagtagatttggacaaggcaatgcgaaatatattaacgcaggaagaatttacgaaagacggaggtaagggcaatgtcgcaggatggctgaatacgataacggtagaaaatgtacatccaagtacgactgtggcgatacgaatgaaggggcttgcaggcaaaacggatgacattaagctgtatgcttatggaaaagacggtaagctgacagaggttccggaagatctgtggaagattcagacagaagatggaacgattccagagaaactgtcggaagatactttgtatgaagtacatgttacagtagaggatggaggaacattcgatcttagtgagacagagaaagagattaaaatagcagtagtattaggaaagtaaagaaaagcaaacggggatggagaaagtagttttctatcctcgtttgcttttctttctatctattcagttacttccaggcaagcttctttcgtaccagttccgccacggcggattccggcgaataaagagcctgatatattatgccatacactgaagatcgctcccggaagcgttgccagtggattggctgcaaaattagctgttgcaagagaaatcgcaagaccgctgttctgcattccgacttcgatcgcaatcgcagtagctttatcatattcgatatgtaaaagttttgctgcgccaagcccgatgcccattccgcagagattgtgaagtgccacaactccaagtacgagcagaccacagcttaagattttttccgcattgacagatacgattccactgatgatcattacgatggatacaacagaaatcagtggaagtatttctgatattttctgaatctgctttccaaagatccagttgatcaaaataccaagaagcaccggaatcagtacaactttcacaacagaaattaccattgcaaagaaagatacttctacccaggcaccggcaagcagatacactaataacggtgtcatcagtggagccgcaagcgtggaagtgatcgtcattccaacagagagtgccacatcacctccggcaatatatgtgatcacattacttgctgttcccccgggacaacatccgaccagaataacgccgagtgcaaggtctgtcggaagatgcatcagctggcataatccccatgccacaacaggcatgatcgtgtattgtgccacaaatccgatcatgatttctttcggtcttgaaaaaactctcttaaaatcgtccatcttgattgtaagtcccatgccaaacatggcaacacctaaaaagatggatgtataattggttgtccacgcgaacccatcgcgccagaaaaatgcgatcacagagaagcagatgataataattccaatatattttgtaagaaaagaactggcttttcctatttttttcatcacattttccataggttatacctcgtagctaaagttgtcgatcagtctggtttttccgatgtaaactgccatagcgatcagaacgtctttttctacgatttctaccggttgcatatccagtgcatctaccatagatacataatcaatctttgcaagaggttcagcttcaatgatcttgcgcatctttgttaatacttcttctgccttgattcctttacaaattgtttcctgccctgcctttacagcttttgaaagacaaagtgcggcttttctttcttcttcacttaaatatgtatttctcgatgatttcgcaagtccgtcttcttcacggatgatagggcatcctacgatctggatatcaaaattcagatcctgtaccattttgcggatgattgccagctgctgtgcatctttttgaccaaaatatgccctgtccggtgttacaatgttaaataacttagaaacaacggtacatacacctttaaaatggattggtcttgtcttaccgcacagtgtatctgataaagtatcaatacttacaaaggcatgcggatcatggtacatatcttccggttccggatgaaagatgacatcagctccaaggctctcgcagagttcgctgtcacgtttaaaatctcttggatatgcttccagatcttctgtcggtccaaactgtgtcgggtttacaaaatcagatacaacaacgatatcattttcttcgcggcatcttttgatcagacttgcgtgtccttcgtgcaggaatcccattgtcggtacaagaccgattgttttcccttctcttttccagttcttaattaaatctcttgtttcctttactgtttttgttacctgcatggtgttctccttttaaaacaaaattaggagatagcctcttgttctgaattcaacaaatttcattttcatttataagttacaatcacttttgcagttatgccatatctttcagtaatccgtgtttctcatagtttgtaacacggctgatcttattctcctcatctacaaaaacaacttgtggtttatgttctttggcttcttcagaatcataatgtgcataacacatgataataatcttgtcaccagtacttacgcatcttgccgcagcaccatttaagcagatcattccgcttccgcgcttgccgcagatcgtataagtttcaaatcggcttccgttatttacatccacgatctgaactttctcatattccataattcctgccgcttccagcaggtcttcatcaacagtaatacttccaacatagtcaagttcggcctgtactactgtagcacgatgaatctttccttttaacatctcaactgtcatttcttattggtctcctcacaaaaaaaagcattcgtcaaggtatactgatccctgcaaatgcttttgctattcttcgtattccctgagtcttattttatgtcttaaataaatataagctcgctttccgccacttcctggcggggtaactgttcaatatgaaattgttgtgattcagtcagagtatagttttgtagtattccaaatactatctccgcaagtattatgacaccctgtgaaaggaatgtcaatatggttgcgcaatatgcgttgttggtcgcacaacgtgtgaatattatgggctgcttctccatgaaaggacgattggatgattataaatgggccggtccgtatatggtcagtaaccaggtggttgcagtcaatgagaacagtgatatctataccctgagtgatctggaaggaaagacacttgccgtacaatctacaacaaaaccggaaggaatttttctgaaaagaacagacagcaggattccaaagcttggtaatctgattagcctggaacacagggaactgatctatacattccttggaaagggatatgcagatgcaataggtgcacatgaggaatcggttatacagtatatgaaagattatgatgcgaaattccgaattctggatgaaccacttatgacagtcggaatcggagtcgctttctcaaaaaatgaaactcgggatctgccggagaaactggagcagactctggatgaaatgagagaggacggaacttctgcaaaaatcataggaaaatatcttgatgacccagaaaaatatctggaggtggaccagcttgaagaagaataaaaaatctgtcccaacagaaaaaaaattctggatcatcagtatagctgttgggatatgtcttgtcgtgctgtctgtatgttttttcagcaatgcagacaaagaaaagaaagaggctaatcttttagacacggtaaattatgtaaaagtacaatgttccacatatacacattataatgaatcatcagaatccaaaagtctgcttcgtgccattgagggaacccggcaggtcagcaaaaatatagccgcagaaacagagaatgaaaaaacactggatgatcagctattgaaagaaagtgcagagcagttatggctgacgggaatcgtggttctggatacagatggaactatagtatgtgaatacagtacgaacgaaagtttattgccggaaataaaagaatgtgcagagaaagaaatcgtactggatacagcaatttacgatgaaaaagtgtatgccaagagaatcaatcataatgacggggcttatattgatatggctgcctgcacaagaaaggatgcaccgggagttgtagtgacttattattatacttctgcagagtatgcaacgaattatacgcttacgatacagagtttgttgaatggctatcggaaggaccgggatgggacaattatcgtagcagatgaaggcgtgatcattgcttcaaacaataccgggctgattggacaaagcacaaccgattatgaagtaatccaaaagctaaaaaatcatgcagacagtaggcacatgatgggcttaacgatcaatggagtccggtgtcacggtgttatgctgaagcagagagaccattacatctatgcttacgttccggattcgatcatatttcagacacttctgcaaaatgtgatcatgtgcctgttcatttatctgattgttgtagcactaatctggatgatttacagaaaatcacagaaaaacactctcataatagaaaaggaaaaagaacagaagtatcaaaaaagcctgatgaaagagaaatcaaggtggaacataaaacaccagagatcattcataaagatcttataggcagcccaatccatctgaagcgtcttctgatgaatatcttgagtaatgccgtaaagtataataaagattatgggaagatttatttgagtgccagagagattccttccgatcaggatggaattgtgacttttgagttcacatgtcaggatacaggaattggtatgagtgaggaattccaaaaacatctgtttgagctatttgcgcaggagcagaaaggcggagcatctaagtttggcggtaccggtctgggaatgccgatcgatatgaaactattagtggagattattgctgaattagcaggaaaaaataaaaatcgtgaggataaaggatgagtgagaaacaaaaactacttattgtagatgattcagaacttaacagagatatattaaaggagattcttggaagcagatatgactacatggaagctgaaaatggaactcaggcgatccagattctggaagtgcatccggagatcgacctgatgcttctggatatcaatatgccgcagatgaatggattccaggtgttggaacatatgagggagttacagtggattgatgaagtcccggttgtcatgatttcatcagaagaatctgtcgaaattatgcgaaaagcgtatgatctggggatcacagactatatcagccgaccgtttgatgcagttatcgtaaagaaaagagtccagaatacattgggactttatgcaaaccaaaaacgactgatcaatgtggttgtagatcaggtctatcagaaagaagaaaacaacacgattatgattggaatcctgagcaatgtattaggttctcataacagtgaaagcagcgaacatatattacacatccgtgtcgcaacggagatgctgttgagagaattgatcaggaaaacagatgcgtatcatctgacagaagcggagattgctctgatcataacagcatcttcccttcatgacattggaaaggtcagcattccggaagaaatcctcaataaaccaggcagactgacagatgaagaattcaagatcatgaaaagccacagtgagattggagcgtctatgatccggaatatggattttccacaggacaagccactggtacgcactgcatgggaaatctgccggtggcaccatgaacgatgggacggaagaggatatccggatggactaaaaggggaagaaataccaatctctgcgcagatcgtgtcaattgctgatgtgtatgatgcgcttacaagtgtacggtgctataagaatgcatatgatcatgatacggcaatccagatgattctggaaggtcagtgcggacagtttaatccgcttcttctggaatgcctgaaagagagcagtcctcagttgtccagaacatttaagaaagaaaaggatgacaacagagagtattatgaagcgcagaggatctcagaagaaatactgaggcaaaatgcattgccatgcaaggattattcccagcgtgttatagagatcatgcaggaaaaaataaagttctttaaggagaatagcggtaagatttcaatggagtataatgcgatttcaggaaaactggttttaacagacggagaatcgcagaaagagtatcagagagatcttccgggatttgattcatatggagtatatgatataagcgaagaggatattcagcgcgtaaaagattcgctggattcagtatcaagtaaaaacaaagaagtttcaataaaagtaatgttaaaagtaagaggtgaaaggcagatgtgtgatctgaaactgcacacattatggtcatcaataaaaacagatggatatatcggaattgtcgggcagttggatattgtgaagtaatgtcacaaaaatggaagacaaaataaaaagagtcacagttgttccctgatggaacaggctgcgactcttttctgttcagatattcaagcagctgcgtaaagtgttctgtagagcttcttcccgcctaaaaggatcttacctttggacggtatctcatatcagacactgtatacactgtcacgaatgcttccggatccttcttgataatataattcatcagtttctgatattcacttttgtccacgatcgtaatgatctctctgtgcttctgcatattatatgcgcctgtcgcctcgtagaatgttgctccgctatgcagttcatgcaagataaactgacggacttcttcttcgtattttgtaataatacatacacgccgtttcagattctggccaaagataaaatgatccagcacaataccattaaaataagttccaagcacacttaaaacgacagctttcttgtcatagatcagagcggaagaaagtgccacacacatgcccgagatggacattgcttttcctaattctatgtgcagatatttattcatgatcttcgctacgatatccagtccgccggaagatgcattcatgttaaataaaatactgaggccgatacttacgaccaggatatagcatattacatccagttcactgctgtttgtcagcgaggtaaaatccggaaatatgtgttcaaatactgcaagatacaacggcagcaggatgctggtgtaaaccgtctttgctccgaactcctttccgcatgtcacaaagcctatcagcagtaggacaacgttcaatatcattgtgatcgttgacacatgcaacggtatataatgcgacataacaattgccagcgcggatatactgctgatcgaggtcatactcggaatcaaaaagaaatatacggccgcggcgataatgcccactgctatcgtcatgatggctgtttctttcaacttgtcggatgtgaaaatctgtttctcttgtttgttcatttatcattccccatttttagatacttagtattcagaaaaatcagataccagtatttatattatatctctaatatattcatggagacaatggttaattttatcagtcgcaattacagcggtcttgcagtttgaaattgcaaacctttatgtgacaaacctaactgcctatgatattataaatttgatataagcgaaaatgacttttgcagaaacgaaagtatctgagtacaaataagcaggaaacagtattgtaaggaaataagaatacaggaggaaggttttatgattcggcttcaggatattgcagatatggcaggcgtcagccgcaccacggtatccaatgttataaatggcaatacgaaaagagtttcccagaaaacgatcgataaaatcacggctattcttaaagaacagaactatgttccgaatatgggttccatgatgctttccggtcatggttccagaattataggcgtagtacttggatttacttacgctcatggtatgcagtcacttcaggatccattcgtgggagaactgattggaacgattcagatggaaatggaagaaaatggatattatgttatgcttattggcggtgaaagcattcagaatgtagtggatattgcctcaaaatggaatgtagagggattgattatcctgggatacaatgaagagcagtatcataacctttcgcacagattaaacaaaaaaatgattttgatcgatgcttatccgaaggggacttatacattccagaatgttggtatagatgattattcaggcgggtatcagatcggagaatacctgtattcctgtggatataagaaagcattgtttgttgcagaaacagagcaggacagcgattactatcggtggatgggattcaaacaggcgatggaaaaacaagggggattctgcagtcgttccagatatatagttattccgggtaaaagaaatcttcgtctcaggaaatacagagaacttcttccacgctttcttgaagcaaaagcgctggccttttcttcagattataatgcgatagaagcaataaatttcttttttgacgaaggaatcatggttccggagcagatttctgttacaggatatgatgacagtgtttacgcgagcatgattcgaccgaaactgacaacagttcatcaggatattccacaaaaagcacatgtggcgttggaacgtctgatgaaattgattcagggagagacgctgaacgaattaaatataaaaaaaccagtctatctggtaaagagggattctgtcaaagaatgacaggattctttttttacatatatatgcgagcaggtgcaataacctgtttttctttgtataaactgtataaaagcaggaaataaactttgttaccttttgtagtttcgcgagaaacctcttgatactgcaaggatgaggtgagtataatgaatggtgtggttgcaggagcggtcaaataattagaaatgaggagacttggcatggagaaaaaatggtggaaagaaagtgtagtatatcagatatatcctaagagttttaaagacagtaacggtgatggcgtgggagatatcagaggaatcatacagaaactcgattaccttaaagaacttggggtaaatgtgttatggatttctccgatgctggaatcacctcaggacgataatggttatgatatttctgattaccgtagaatttatgaagaatatggaactatggaggattacgaggagtttgttgtgtgaagcacacaaaagatccatcaggattctgatggatctcgtagtcaaccatccatcggatgaacataactggtttattgaaagccgcaagtcaaaagataatccatatcgtgattattatatctggaaagacccggtaaacggaaaagaacctaataactggggcggagcattcggcggttctgcatgggaatatgatccgcagacacagatgtattatctgcatctgttttcaaaaaaacagccggatctcaattgggaaaatgaaaaagtacgccaggaagtttacgatatgatgaaattctggtgtgaaaaaggaattgatggtttccgtatggatgttatcagtatgatttccaaagatcagagatttccggatggagaaatgaataacggactttatggcgattttggaccatatagcgtacatggtccaagagtccatgaatttcttcaggaaatgaatcatgaagtcctttcaaaatatgatatcatgacagttggtgaaacagctggagttacaattgaagaagcacagaaatatgcgggtgaagacagaaatgaactgaatatggtattccaatttgagcatgtggagagtggatgcggagattatggaaagtggacaactcaaaaatatgattttaaagagtttaaaaacattatgatcaaatggcaggagaaactccagggtaaagcatggaacagtttgtttttaggtaatcatgatcaaccgagaagcgtcagccgttttggaaatgacaatccggtatacagagaaacatctgcaaaaatgctggctacctgtattcacatgatgcagggaacgccatatgtataccagggggaagagcttggtatgacaaatgtttattttgacaaactggaagattaccgtgatattgaaagtattaattactttgaagagtttactgaatcaggtcttatgactccggaacacatgatgaaatgtctgatgctgagaagccgtgacaatgcgagaactccgatgcagtgggacgacagtaaacaggctggattcacagagggcgagccgtggatcaaagtgaatccgaactacaagaagatcaatgcagcacagcagcttgaagatccggattctgttttccactactatcagaaactgatccgattgcgtaaagaaaaagacattattgtttatggtgaatttgaacctctttatcgtgaggatgaacagatttttgcgtacacaagaaaacaggatcaggaaaagcttctgactgtctgcaacttcagtgataagaatgcagaagtagaagtgccggaagaatttaaaggcgcagagtgtttgatcacaaaccttgggagaaaagaatttgacggaaaaattattctgaacccatatgaagcattcgtattatattataaacatcaggtgacagagaaatgattagaaaatatagatatggaactccgtttaatacggaggcactgactgaaaaaattgaaacaactgagggcgttctcccatatggggaggtcagtcaggaggaaggatttgtttttacttatatcatggatgaagatgactttgtctatggtctgggtgaagccaatcgtggaatcaacaagagagggtattgttatatcagtaattgcacagatgatccggtacatacagaggacaagcgttctttgtacggagcacacaactttatcatcgtgagtggaaagactacatttggattgttttttgactatccgtcgaaactgacctttgatattggatatgacagagaggatacactcagggtatcctgcgaaaatgctgatctggatatttacgtgcttgaaggtgagaatgcttatgatatcgtaaaacagttccgtcacgtaatcggacgcagctatatcccgccgaagtttgcttttggtttcggacagagccgctggggttatacgacgaaagaagatttccgtactgtcgcaaaaggatatcgtgagaatcatatcccaatcgatatgatttacatggatattgattacatgcagtcattcaaagatttcacagtgaatgaagaaaattttccggattttccggaatttgtgcaggaaatggatgaccaggatattcgcctgattccgatcattgatgccggtgtcaaggttgagccgggatatgagatttacgaggaaggtgtcaaaaacaactatttctgcaagagagaagacggaagtgattttgttgcagctgtatggccgggagatacccatttcccggatatgctgaatccggaagccagaaaatggttcggagacaaatatcgttttctgatcgaacagggaatagaaggtttctggaatgatatgaatgagccggcaatcttttattctgctgaaggccttgcagaggcaagagaacttgccggaaagtttgcaaaggataccgaaggcaagacccatccctgggaaatgcaggacaagatgctcagtattgcaaataatccggaagattacaaaagattttatcacaatgtcgatggcaaaaagatccgtcatgacaaagtacataatctttttggctacaatatgacaagagcagcaggagaagcttttgaacgcattgacccggaaaaacgttttctgatgttttccagatcttcttatatcggaatgcaccgttatggcggaatctggacaggcgataataaatcctggtggtcgcatatccttcttaacctgaagatgctgccgtctctgaatatgtgcggtttcctgtatacaggtgctgaccttggaggatttggcagtgatacgacaagagaactgttgcttcgttttcttgcacttggtgtattcacaccactgatgcgtaatcattcagcaacgggaacaagagagcaggaatgttatcaatttgaaaaaatcgaggatttccgcgctgtcattaatacaagatatcgtcttgtgccgtatctgtacagtgagtacatgaaagctgtgctgagtgatgacatgtatttcaaaccacttgggtttgtttatccggatgacaagagagcaatcaggatataggatcagctgatgcttggaaacgagatcatgatcgctccggtctacgagcagaacgcaagaggccgttatgtttatctgccggaagaaatgaaatttatcaagttcctgccggacggaagcatttctgaagaggttctcgcaaaaggtattcattatgtagatgtggcactaaatgaagtaccgctcttcattcgaagtggtaaatgcatcccggttgcagaagcagcagagtgtgtgaaagatattgataccgaacatctgcagcttatcggatataaaaacagcagttatacgatgtatgaggatgatggaatccacaaggattacgataaggaagagaattatcgggtattcacaaattaacttttgacaaagattagcaagaaaaaatatgtaaacggtagggtagaatataagtaccgtgatgaaaaaggatggtcaaataagtggccatcctttaaaattgcactgttttctcattatcattgaacgaaaaataactaaaagaaaaacactattaacgatcgatataacaaataaaatcacggaaaacgaataaaaaattcggaaacgaagaaaaatattgaagaaattagtgatttatgatatcgttatagtcataacgtatagtgtggcaggatagttgtaaggagaagaataaagatgaaaagaccgattgttcgtttgtcatcattacaattgacaaatattaaaaatgtaaaaaatggaactatatatatgccgaataccgtaaacaaaatattatcagcggacaaagcagaaatactggggatttacggacaaaatggttcaggaaaaacagcgatcgtggatgccttatattttttacaaaaagtaatggtgggagccgatttggatcagtcattagaagattacatgactatagattctgatactgctgaaatttttgcagatttcaatatttttatggatggtattgtgtttgaaatagggtacacattaagccttagcagagaagaaaaagagattgttattaatcgggaaatattgagatccgcaaagaatgaaaatggaatcagaacaaataagactacattcatggattatcaaagagatcaaacggatgttatttttaaaccacagaaaagactggatgaaattttggaagccaataaagaaataaaaacagatttaattgtagcacgcaaaatggcagagaaaagtaactgttcttatatttttggtgaaagcagtcgggaaatattctgtagagaatataaaaatggatttcaacagttttcagttattatatcttctttgtttgaatttgctttgaaagatctatttgtgattcgcaatacacattcaggagtgatttctgctaattttgttttaccaatggcttttcggattgaaaatgataatatcggagcaaaaggagattttgcagttcctttgacagaaccaatcctggtggatgaagaaagaaaaaatctgttagagacaattgttgaacagattaatattgtgttatacacaatcattccgggattgcaggtaacgattaaaaattatgggaaacaatcattggataatggagaagaaggatggaaactggaattaatgtcaaagagagagggcatgaaagagattccaatcagaatggaatctgagggaattattaaaattatttctattctaaatgcactcatacaggcatttggaaatccttcgatttgtttggtgattgatgaacttgattccggaatttttgaatacatgttgggggagttgcttgatattttcaaaaagagtgcaaaaggacaattgctctttacttcccataatcttagggcacttgaaatgattgataaagaaagcattatgttctctactacgaatccagataatcgttatatccatatgaagaacgtaagagaaagcaacaaccttcgcaatatgtatatcagaagcattacattgggcggtcaatcagaacaaatttatgaagaaaccgatagtttgaaaattgccagagcatttagaaaagcaggacggggtgttcgtagtgaatgagaaaaaagtaattgcggttattgtagaaggaccgagtgacgaggccgcattgggatccattttaaaagaatatttttcgagtgaagagattcagtttgtagtagttcatggagatatcacgacaaaggattatacatcagctgacaatatactttccaagattaacaacttaattgaatcagtaaaacaaaaatatggatacaggatagaggactttttaaaaatcatacacattgttgatatggatggagctttttgcaatgatgtaattgtgaaaaaggatattgagggagtcagatattatttggaccatatagaaacgaaatatccagattatttaatccgaaagcatactcaaaaagcagagatattatcaaaactatattcttccgggaaaatcaatggtgtcagctatagaatctattttaattcttgcaatttggagcatgttcttttcgatgaattgaaagattttacagatgaagaaaaagcagatatggctgatgattttgcggaaaagtatgaaggtaaggtagaggattttgttgaatttatttctcaagaggatttaattgcaccaggaacctttaaacaaacctggcgatttatagaaaaggaaaaacattctttagaaagattcacgaatatgcatttgatgtttaagtaataacatctatctgtatgttcctgctttttatctggtagcatgagcatagcaagagccactaattgtttacaagtctaacaagagatgggagtagaacagcgtttagaacgaatgatttatttggcggatgaacgagaagtctcgcaagaggcagaaccccaatctgcctcttgtgagaaaatacccgtttcacctcttggattagtatttaattaatgcaaatccaagaggtttatttatgcttttggagagtgtaaactcatacaatctttatctccagaaatctgttttttgacgaagatcgatgtctgcacttttaaaaaccgggttgattccctgttttaactgcacttcataatcttggatcgctttaaacgcaatccctgataaaatcaggataaccggaatgttaatgagcgccataacacccatcagtacatcggaaagatcccacaaaagagacatttccattcctgctcccagaaagattgcaagtgccgataccagtctgaagcctttcataaaagctttttccggctgttttttgtgaatgtagattaaaagattgtcacaatagaaacagtttccgagcagagttgtaaatgcaaaaaataccattgcaactgtaataaagatcggcccgaaagaaccaagtgattcctgaagagatgcctgcacccacggtgctccctgcaattcttttgccggatcgatcccggatgacatacacatcattgctgttgctgtacaaagcaacaaagtatcaataaatacggataacatctgtaccagcccctgttttaccggatggctgacatttgccgaagctgatgcattcggagcggaaccgatacctgcctcattggaatagagtccccggcggattccctgcatcatggctgaaccggaaaatgctccgaaaattgctttgaaatcaaatgcttcttcaaaaatacgcacgaacattgccggcacattctgaatattgataattactaccaaaagtgaaattccgatatatgcaatccccattaccggcacaaccattgaagttacttttacgatacgtgatccgccgccaagcagacaccatcctgtcagcactgccaaaatcccaccgatgatccagggactcatctttgcctcataaaaagaaaatactgaaaatgtagactgcagattataagatgccagcatattaaatccaaatgcgtaggttaaaatcattgtaacgcagaaaacaattgccagtgggcgacaatgaagtgccgcttcaatatagtaagccggtcctccataacagcttccgtcttttccttttttcttataaatctgtgctaatgtactctcgatcagtgcagatgcacttccgatgatcgcaatcacccacatccagaatacagaaccaaatccacctatacaaattgccgatgaaaccccgacaatatttcccgttcccacacgggatgctgttgaaaccataagtgcctgaaaagaggaaattgcccctttatcctccggcttttccatcacggatccacaagcattcttaaataatcttacttgcggaaatcttgtgcggattgtaaaatagactcccgcaccaatcagtagaatgaccagcagcttgctgtacataaaagaactgattgtaccaataattgtttgaaacataccttctttcctttctctgtttgctgtcaatatattaacggaaagaaggtggatttgcaagtttttttacattttagtacttggcttgaaaacggatggaagaataacacgatactgtgatagaataaggaaaatggttaaactaactattgttgagtgagtagcagcaaaagtaagcatgactggaaagtgcttgtgatcttagggattaagagaggatacagattatggaagattcttacgtattacaactattaaaaccaaagtttaaagattttcatttgtgtttctgcggatttgcagaatgcaagccattacatagttatggaccggccgcaagacccaattatattttgcattatgtaatgaagggcaaaggtatctatcaggtaggtgaaacgaagtatccgctgaaagaaggacaggcctttctgattgaaccggaaagccttaccttttatcaggcagataaaacggacccatggtcttacctttgggtaggatttggtggtacggaggcacagagatttgtcagagatctcggattgaacagtcgtcagcttacatgcgagtgtgaatatggagaagaactgaaagaaattgtatttgaaatgcttcatcatacgagttcaactgcagaaaatctttattatctccagggaaagctctatcagtttttctcagtactggctcgtgggattgaaattcagcaatattcgaatgatacaaaagaaagcatacatgtgcaggaagcaattgcctatataaagaattactattcacagaaaatcacagtggaagatatagcaaattatttggcactaaatcgaagctatttatatacaatatttatgaacagtcttggaatctccccgaaagattttttgacggaatttcgaatttccagaggaaaggagcagctcgtacttacagatctgtctgtggaggagattgcagtttcctgcggctatcgtaattcccttgctttcggtaaaatattcaagcagaaagtgggaataacgccgacccaatatcgtaatgacaacagaaaggatgcccaagaacgattgatccgtgcacaaaatgaactgaaagaatataagaagcataaaacaatttatgtaggaaacatcgaaaaagaatagataaaatgttaaaaaagcatctgatacctaacatttgagatataattcttaacaaaaaggtataacggatgcttttttttgtacgctatacttgtatcaacaaacataaggaacaagtgcacaggtttcttcacttaaacaacaaataaacaaatgagtgttagaggagaatcagttttgttattccaatcattcttgcatttgccagctttggtatttacaaaaaatactacactttaaaaggtgagaagatggaagaaatcacaagaaaagtaaatgaaatgcatgcgaaaaagcagacagcttaagagtcaacaattcaattataaaagggggagtatatgagacagattatttttcgcgaggaaacaaaaactttccatttatacaatgaaaaaatcagttatatcttatgtgtattagaaaatggacatctgggacaattatattttggaaaacgacttcatgataaagcagatttttcttatctggttgaaaaatgtggacgcccaatgacatcatatatatatgaatgggatcgtactttttcattggaacatatccgacaggaatatccggtttacggtacgacagattacagacatccggcaattgaattgttgcaggaaaatggcagcagaatcagtgagttccaatatgaaagctatgagattattgccggaaaaccgaaactctccggattgccggcaacttacacagagtctgaggaggaagcgcagacattgcgcatcttcctgaaagacgctttgactggtgcaaaactggcgctttcatatacgatttttgatgaatatagtgcaattgcaagaagtgcttatattgaaaatgccggtgagaaaaatctgcatgtattaaatatgatgagcttaagcctggatcttccggataaggattatgaatggatgcagttgtccggtgcgtggtccagagagcgctatataaagaatcgaacattggagcagggcataacagctatcgacagcatgcgcggaaattcttctcacgaacataatccgttccttgctttaaaacgtcacaacacagatgaaaatgcaggagaagcaattggaataagccttgtatacagtggaaatttccgtatgcaggcagaagtagatacacatgatgtgacacgaattacagccgggatcaatccggaaggattcgattggaaattagaaccgagagaaagctttcagacaccggaagcagttctggtttacagtgaaaatggattaaatggcatgagtcagacgttccagaagttgtatgctaagagactcgcaagagggtactggcgtgataaggcaagaccgattttaaataacaactgggaagcaacttattttgactttacagaagatcgccttgtagagattgcaaggaaagcaaaagaatgtggagtagaactgtttgtcttagatgacggatggtttggcgcaagaagaaatgacagagctggtcttggtgattgggtggcaaatgaagagcttctgccaaatggcatcaaaggcctgtcagaaagaattgaagcactaggattaaaattcggtctttggtttgagccggagatggtaaataaagactctgatctttatcgagcacatccggactggatcttacagacaccgggaagaaatacatcacacggcagataccagtatgtactcgattttgcaagaaaagaagtagtagatcatatttacggaatgatggcaaagttattatcggagtcgaaaatctcatatattaaatgggatatgaaccgaagcattacagaatgctacagcagcaaacttccttcagacagacagggagaagtgttccatcgttatattttaggtgtatatgatctgtatgaacgtttgacaaatgagtttccagaagtattatttgaatcctgcgccagcggtggcggaagatttgacccgggaatgctgtattatgcaccacagggatggacaagtgatgattcggatgcaattgagcgtctgaagattcagtatggaacttctatgtgttatccgctcagcagtatgggaagccatgtgtctgttgtcccgaatcaccaggtatttcgcaataccccattacatacaagagcgaatgtagcatactttggaacttttggatatgaactggatctcaacaaattgacagaagaagagatcaaagaagtaaaagaacagatcacatttatgaaagaataccgagaagtgttgcagtttggaacattttatcgtctgaaaagtccattcgaaggaaatgagacggtatggatggtgacaaatgaagaccgcacgcttgcaatcgtaggatactatcgtgttttaaatggagtgaatcagccgtatagccgtgtcagattacagggattgaacccggatatggtttatgaaaatgtatggaaccatacagaaaattacggagatgaattaatgaattatggattgatcacatccgatgtgacagctggtgaagtgcctgggaatgtgactccttgtaccgattttgaatctagaatatatatgctgaaaggcaaaaaagttcaggagggaagatagagcatgacgaagacaaaaagaatcagcggaatggtactgggaatattgtttattggattatgtgtatctttcttacgactttcacaatttggcgtggatccattcagtgcaatgaatcttggaatcagcggatttatcggatggagctttggaacgtggcaactgcttgtcaatgcaatcattcttgtagttgtattctttcaggcaagatcctgtattggtttggggaccattatcaatatggtatttgtcggatatattgcagattttatttgttatgtagcgaataatgtagtgcagattcagatgaatctgccactgcgtatccttgcactgctgcttgctcagctgatggcatccatgggagtggcattatatatggtcgcagatatgggaatcgctccatatgacagcgtcgcaattataatcgagaaactgacacatcaaaaaatcccattccataaagcaaggattctttcggatgttgttgttgtgattatcggaatcatatttgccactgcatctggggcgggtatctggtcggtagtagggattggtacaattataaatgcctgcttcaatggtccattgattcaattttttaaaacaaaactggagagattttacttgtaaaatctaaggattacaattctccaattcttgcaaggctcatatccagaacggatacgggcctttctttttcaccagtagcttcatccaaaccttcatattgaataatgaacccttctctttggtaaaaagaaattaaatacggcattgatgattaattccatatcgacttcttcagaaaccgacaaaagcaaatgtatctcctgtatgaggtgcgtgtccatatgcccagttcatagttattgataagagagagatttgccctggcgttcatataaatccgttcctaagaagtttagtaaaacatctcttgaccaattgttttcaatagtctttctgatataaaacaatgcctttgcagaatttcctttgcatttatcaagtattattttgttatgtctccatggtattctaaaaatgatttgtaaatcatccccaacttggggacgatttgcatctgtaatcaattcgtcctcaacttgaggacaaattactgcgtcaggatacatctcataaaagtatctcatatatttcaagttagttggagaaaatgatttcacatctggcaaaatagatttcaaattgtcactcaccgttttataaaatcttgttccatatccaaactgttcacttatatataatcctttctactgtgtcagttcgacaattgccgagtttacagtttctttataggatgtctaatgaccgttttccatttttctggggcaacctttcttgcatcagacagatatatttcatgatgtaatctttccatattcatatcattaacatatccattctgctccaaatacgcatccataagtgcaacagttgccggttcatcatcaaatgctcccaagtgcattatttgaacacataatccctcgtcaatggtcacaaactctgcagatgaacaatctatttttttctttttggttgctgtttcaacagcccattcaaaatccttttgatttacaaaatcaggcaggcgtataactgaaatccaattaaaagaatctttatctgcataatttacaccatgtatattttcctgccaccagaatccttcaagtggtggaactacatattcaaaaaatcctgcaattttatgatctgtcttataactcattctcaaagtatatgcaaccgcatataatacactaattgcctgctgatatgctccaccttcttcgtttggattaccctttcctctgaccgcaatataatttgctttagggacagtcacgatctctggtttatttttaggcatataaaactctttatattctttcttaaaatcaaaagccataactaactccttaaatttataatttatgaactcaaattcgttaccagtgacgaatatctttttgtcttgtttttaatatcttcctcagtaacaccataataactgtataaatttctggatattttcttaaattttttcattaccgccttatttcctgaataagacattccaaatatattccaagtataatctatctccatttcaagaaaatcatcatcgattcttattttatacaaatgaaaatccataggaattatactatcgggcatttcagcaatcatttcacttcgagtctttattttacccaaatactctttgacggatgcttcattagaaaaatccggtaccggaatatccttcatttcacccaaaagttctggttcatactgcaaaatcaaactctcttttagacattttatttgtttaatatattctctatcagcgggagcagtttcggtcaattcgtatttatcttttgcatactgcactgtttcagaaagagaatgaggatttgcaattattgtcttctctactttttttctcttatatctatatatgctatttttgattctaatctttaatggttgcttttttgaatgtcctgctataaaaatgcttgtaggaccatctgcaccacctatgattgaaatcgcatttttacttttttgcttcattcaccttttcctcacaaatcccgatttctatttttgtttccatagcatggtgtactctttttcaccagtagcttcatccaaatcttcacattgaatagtgaacccttctctttggtaaaaagaaattgctctggcattcttctggtatacatttaatcgtaagctaacttttttatccttaatataatccaataaaagtttacctatgccacatgactgcatttcatcagagacaaaaacaccttcgatatattcatcattcagtcctacaaatccttgtatctttttatccgcttcaaacacatagatttcggattgtaacatcatttcttttactagttcataattacttttccagtattgattggaaataaaataatgtgctttcagatttgtctttaaccatatgtcagcaactttatcaatatctccgttcagcaactttctaatcataaccaatattctccccaactacatcctttatgtttttctctttttttcattctatcacaagcttaccattaatcattatttttttgatattttttatttcctatcgtaagtacaagatattttcttgtttataactattcttttctaataaaaagtgaaaatgcaaagtaagcgatatctgtaacctattttgtgaaagtgaactataatcaattaacgttagtaagttttttaaatataaaggagtcaaatcagtgtgatttggctccttcccttatctgtatatctatgcctcttgccttcttgtttttcatgatattttcatatacaacgtgtgagacaactcccgatttgattttttatattatatcaattacatttgaacaatcagaagtgctggcaagtgtatatcaaccgtatttatatttaccaagaccggtttccagaaggcatccgatggatataggacgcagggcaaaacagtttgcaccttttgcagcacttcggggactggatgaaaccgttcgacaacaagagattctttatgaacctagaaagattctatcggaggaaaagcaaaatgagttggatatgaaattgaatatcttaacttgtgaccggaagatacaagtaacatatttcgtaaggtcacagaagaatccagtaatcggtcaataccatacgataatgggaactgtaaaattctttgattcatcgtcatatttacggattgatgatatcactcccttacttcttcgcgatagttcctcgcaataatttctaaaacaaaagccgatcatatattattatacaaccggcccttgtacatcttcaattatttttcaaatggtttgtattcaacatcaaatccaaagtgcttaggtccgaagcattccaaaccttctggagtagtccagatttcaggggatggaagtgcaattactgtcatcttatcaccaacttcaaaattaggtgtagtcattggatttccttctccgttaatcatgcagatcaggtctggagcaattacatcaacttcgccattgcggtatgagatgatgttttcgttcttaaaccagatgcgatatgcttcgtccgtataatctctttcgccctttagatgaatttcaccaaagttgaagccatctcttgtttcacaagtgtaatctgaaatgtggcctctgaataatactttaccttctttatcatcacagatagcagaagcaacatctccgccagcttcctttgtttctctaagaactctaccgatttcctgagcgtaagtaattgcaccaggaattagagaattcttgataaccttaccaacgtttgcgtgatcagctacacctacaaggttgtcacttacaacagcaatagctctaacgatatcttcagctcttaggtcatccgctacattctgaattacaattttttcaccaaattttgtagctacgcccatagggaaaataggaacgttctttacatagtatgtagaatgctgcagttcaggaactgaacgtccggctgggtcagcgtcaataagaggtaaatccattaacagtgcaacgtgaagagcctcagctgtattttctccacctaattcagttgagccaattgcatacattttcttacctaaagattcctctagagcctgtacagctaaaactgcgggagctgtttcgctatgcttcagatgagctaatctaggatcaggtttagctgatggagcaccgcaaccataaggagtaacaacatactcgtcatctggaagttcatctaaagtgattaattttagagtttttcccttttcgaaatgttcttctaaaagagccaaaccgtcagcaagtggaccgccaccaccggtaccaagcactgcacatccgtacaatagatcgatcatgtcctgtttgtttaattctctcatttttctgtctcctctttttttgtgataatttatgctatattttcggcgttatctcttgatgcagatggaataaagcgctctgcaataagatagataacaaaacctataatgataccaacgaattcaattttaactagtgtataagaaataattgcacctaatgcccaagcaattacaccagcccagtttacaccgtcctgtggtctaaagttcttagctttaccttttcctacaacccagtagtcagcaagaattactccgccaacaggacaaacaacgtatgatagtaagcttaacactccctcaacgtgtcccaagatacccaggtcgcataatacaataccaacaattcctgaaattaaagtagcttctcttcttcggttatctttaagcttaagtgccataacaatgttaagacctgcgctgtaagcatttgttgagttagttgtccatgttgaaataacaagtgcaatgatgcccaggagtggaagtcctacttcaattagaaccatactgatatcatactgtcctgatagctttgtaagaacgattcccataatcagagttattacacccattgggaatacaccgtagaatacagatttaacagtgtcttttctgcttttctggaatctagtatagtcaggaccagtgattgtacctacagcagtgaagttaaatgatagtgctacacctgacatgaagctcatagattgtacagttccttcatcgttaaggtttcctgttccgtaaaccttaaatgctaggaatgttccgtagcacataatgatcattagtaatggaatagaaatcttgtctagtttttctagcgcatgcactccatatactgcagtcagaagcattatgattccccaaattgtgtttgaaactacaactggaatatcccatccggtcatagctagcattgcgttactgaaggcttctccacatactccattctggattccaaaccagccaatcatgttaacagcaaagattgtacttacgataaatctagctccgctttttccaaagccggcctgacagcatgtgcaggatgctagtccaaggtcacagcctatcattcccgttgcaaccatacctactactacaattaagtagcctagtgaccctgaaataattgctggccatataggcattgcttccgctaataacgctcccaataggaatgcaggaacgcatacacatatgccggcctgaacgaaggctaacgaaatccagtcttttctgtcttcagcagaaatcgcctgcagagctgtgacttctgctttcttacctttattttcatttgtactcataatggatacctccttttgaatcttctctatgatagcacacattattataaatgataattatgcagatgacagaattatttatcaatcatattgtgcttttgcacaaaagccttgtttatgactgtgagttttgatatcataaaggaaaaaattatactaggaggagccatgagtgttactgttcaagattgtttaagactaccctcttttcattctgcgagagtgattgcaggcaagaatggactgggtagaatagtatcatcagtatctgtaatagaaatacctgcaaagtctgtagaggcaattagtgtattcaatcccaatgagttgttagtcacgtcattttattcaattaaagatgatcctactagacaatgcgaggaaatgagaaacttatatgatgctggaggcgttgcactagtgctgttttacgtgggtgacgtcatccctcaggtgtctgacgagttgttgcagactgcagacgttatgaacatacctttaattcttattgaagacgaagcagaatatagtgttagttatagtgatgtaattaaagatgtaatgggggctgttttctacgatcaggcatctacggattccttttcagacactgtggagaatagattgaagcagattccttacaataaaagaagcatggaaaccctgctaaatgtaatagctgaaacttataactgtaaccttgtgctttataacaaaaacggtttatatttcacatctatatataagccgtcctttggacaatttggtccagaattcttttttaatgccttcgctgatggctcaacggaccttttctgtaaaagcataatgttgcaggataagtcattttatttgtatagaaaagagttcccccacgcaggaaatacctggcttacattatatgcttcaagcaacgaaaacagcattagtgaacacaagctagatgaaatttgtgcatgcacaaatttcttctcaaccttatggggctacaccctcgatatgcagaattataatactgttattactttgatcttgaaatcatcgcgcgtaataggagaaaaattccttgaagctagtggtgtgcctttttctaagctttcaactattcttgtagtagaatcggaaaaagacaatttaacagacattcttcggcagattgaaggcatattgaaggaaagtgaaagattctacgttaaggatattattgacgacagacttgtaattctaagttctataatggtttcccaaaaggatgatggcattatagctacggaaatagagaaatgcataaacgagtatgagggagccttgtttttcttggagtctagcaaaaatctaacttcaatgaggaaaatatactcagacttttgtgcaaattcagcagcaatgagcaaaattttcatccaccgaaaatttcgcgacatgtatgatgttatattttcgcaggaaatcacaaatctagctataaatagaggcaatcgaaacgatcaaatcaaatccataatagaagccttaaaggaggacgacagtgacaacctgatggaaacccttgcagtgtacctaatcgactgcgactcccagttgagcaccactgcagccaccttgtttttgcatagaaatactgtgacgtacaggcttaataagataaagcagataacaaacaccgatttcacccttatgccggccacctatgatttttatctagcagctgcgctgtggcggttaaacgaaaattcctaatctgagaatttcaaatcaaagtctatcactcgtgattgacaaaatatgacgagggctttattgcagtggtgcgctcggtgagcacacccttacatacaaaattaggagaatcttccattttgtatgtaggggtgtttcagccctcctttagtactgcgattcgtgttgtgatcagttgtttagtctgttctatatatttctccggcaaataggaatcttcacatgcacataaaagtttgtcttctagagaacacattttagaaagcattttttctgctgcattctcagcaatgccacacttagatgcaaaagacataaaatcacgttttttcagacgtctcttctttccatttagagtcaatgccatttcttctttatcttctggtactgcgatatatctctgaatctgctttgggctgtcaccaaactcttctccaattaattcgattgtcttcttgcctttcttttgttggccactttgtccctttttccgacctactttttgtttcattgcttcatttttcattctgtaagcaaaagctttttcgctgaaagagatatgttcccggtgcaaatttgtatcaaccatttttacaaccgcatcttcatagctcataggctggatcagtaccggtatttttctatatcccaaaagcgcagcagctctttttcttcgatgcccggaaatgatttcataagtaccatctttgattggtctgacaagtagtggtgttaagatcccgtacattttgatactttctttcagcttttccagatcgtcatcatcccttacttggaaggggtgatgacgaaatgctttgagtcgttctatttcaatctcaactatagtttcgcctttccaattacttttttcttttactttctgtatgatttacctccttatcttaggacgacaaaaaacccgtccaaactagaattttttataaatctagtctgaacgggcatgccattcgttcgttagcagggctaactcttaaatatagatttcagctaatcgatgtttgcaggattcaaatcggatgagtgaatttactttacttttctctattttacatcccttttctttggttaataagaccactttcccaaatgttagcaggactgtaaatttttcttgttagcaaatgactgctttttattagctgtcagctaacaattttatggatttgttagcagaaacagctgattttcaaagcaattatctttcgaaaaaaagaaaaaagcggataacgattttgctaatcagctaatcatttccgcctcttatcaagcgttccctgtaggaatcgaacctacaataaagtcttaggagttatacagggtgctgtcaatttttggtatgttctgtataataaagcctgatttttcttatgaaaaacggctttccaatttttatccagtcaattactgtaatcagctataaaccttagataagtacagcttgttagcaactttttagctacagctaatatttggggaagtatgtaatgatactaactacatcaatcctatgactaccattcccttagaggtggaaatgatatctatatttaattgactagatttatatttataatatacaacgtgagcgtgtatttgtctatggaaatttcgactactttttatttttgaaattaggggattttccaataatgcatttccattaaaaccaacgcttccttatagacgctatattatttattctattccaaataggtgcaaaaaaagagcatttacggttttacggtaaatactctttttactgccaatattcaatttatatcattcggttttcataatcttgtaattcatggaaaatatcatccacatatacaacatcattttctattctgtacaacataaagtatctgtgctgttgaaaatttattcgacgatatccaaggctctgtaaacgtggattgtcgcatacattcaaactactcgctacatacttcaactttttaatagtatcctcaaaatcatcaagcacatttttggctgcctgcttatttttcttggcaaaaagcagatactgtataaactggttcaagtcttcttctgcttcagctgttacaactactttataatccatattttcctctcatatctgaaatcacatcatctgcatttcggtaatttcccttttttgaagattctctggattgttccagtctttgaagcatctcttcttctgtcatagatgtataaggattatgcacagttcgttttatttcaaatggaaatccattatatgcaaccgcctgcgttaaaaacatccttattgctgatgtcgtatcagttccaagatctttaaaaagctgatctgatttattttttaagtcatcgtctaccctgatctgaattgtacttgccattttagaaacctccttttttcttcattataatgccatttcattgctgattcaatacaattgtattgatgttttgctcgcttttattgaataatttctataggcatgatggagatagactcactacttttcattacttcattgtcttagccagcgaattaagcaatgcccgcatttccggattcgccagagctttcatcaataattccatatcgacttcttcagaaaccatatttggatcaagattattttttttgtaaaatgcatcttcaaataattcagcgttcttttttctgtcttcatcaataatatgggaatacacatctgtaaccatatctgtctgggaatgaccagaatcgccctgcacagcttttatatcacctttattaagctttaatttataggtgacactaaagtaactgaccatcatgcgattcttccaaccgaggaactaagaaattacgatctccactcattgaaagaaacggaatatcaagttttgtttttaattgcaatcaggttattgatggcaacagaccaggagtataagtatgaagaaatctctgttcaagtggagagtaaaggtgaattattcgaggcgaagggaaagaagattctgcagtatggatggaaactttatgaggagtgtttcaagaatgaccaaggaatggctatggaagaattttgtgcatcagaaaaagaatttccggaagtgataaaagagacaatctttcggtgtgttcctgttcaaaagacagtgcattatacaacaccaccaaaagaatataccgaagatacgttacttgctgccatggaaacagcgggaaataaggactttgaaaaggaaaccgaaaagaaaggtcttggaacaccggcaacaagagcgtccatcattgagaagcttgtattttcgaaatatgccataagaaaaggaaaacagatttcctgtacagaagatggaaaactcctgatagaagtcgttccggactatttgaaatcggcagcacttacagcggaatgggaaaacaagctgttggaaatggaaaagggaaatctgacggatcaaagttttttagaaggaatcaaaggaatggtgatgttactgatctcagattgcaggaaactttcatccgagcagacccataagtttgatactaggaagtccatcggaacctgtccggtctgtggaaatcctgtttacggtggaaagaagaatttctattgctccaatcgtgattgttcctttgttttgtggaaagaaaataactttcttgaaaaaatgggtaaaacgatggatgaagcaattgcaacggcacttctgcaaaagggcagggtaacgatgacagatctatattctgcaaaaaagaataaatattttaatgcggatctcgtaatggaaatagaggatggaaaggcccgattccagttggagttcccgaaaaatacaacaagaaaaaaggagaactaatcgtatggattttaagacatttaaagaagaagtaaaagaaaatgtaagagcacatttaccaaaagaagcgaaagatgtggagcttagttttgggacatatcaaaaaatgaattacagttatgaagcactttttattaatattccagagaaaaatgctcaagtatcaattaatcttgatgagttatatgaagcatataaagatggtcaggatctatcaaaattttatgagataattccagaaattgtagaaagtaaggaagtggaccgtgcaaaagaaatcagttttgattatgaacaggttaaaccacatttatttattcgggtagaccgggtagaaggaaatgaaaacattttagagaatgttccacattgtcagatggaagatttggcattgacttatcatgtcctattaaataaagacggggaaggaatcagcaaggcaatgattacaaacagctggctggaaatacttggggtcactcaggagcagttacaccaagatgcattaaataacagtcagaaactgttcccgttgtctgtgatgacaataactcaggcagtgatggggggtatagatccaacaggagtgtttgcatcatcacaggaaagcctggaagaagcgttgaaagatgaagagataccattaattgttgttacgaataaaactaaaacagatggagcagcggcgttgttttatccggaagtaatggagcagttgggagaaaaaattggagattttacgattctgccttcctctacgcacgaaacattgattctaccagattcagaagggatgccgatacagcatctcaaagaaatggtagcagaggttaatggttcatttgttgaagatgcagaccgcttaactgatgaagtatatcattttgatacaaaggaccgagttttcgaaaaagtagacaaattcgttgcaagacagaaagagaatagccagaaacatgttgcggagaaaggaactgaaggaatctagaaaccgaagaaaagtcatgagatgagtctttaagtatgagaaatattccaataatgtaagaaaccgttgtgagaggagaaggaatcgttagaagattaggacttcagtttggcttcggtcgggctgaggtccttttcttatgaactaagaaaggagattctataatgcaggaaacaaaagaaacagaagaaaagaataaagatggaattacaatccaagaattaacagaaaaaattcgacagatggatcaggaagaattcattgtaacagttagtttggaaggagggcttgcggatggcagagaatgagatgaataaggggttaagtcaggtgtctattcgtttggtgcaggaatccccattattaagtgacgaatcgatcaatactcctgaacaggctgtaaaagtattgggagaatggttagaaggaatggatcgggaactggtttgtgttttgaatctgcaggcagatttgaagcccattaatatgaatatcgtcagtatgggagctttgaatgaggcacaggtgcatccaagagaagttatgaagagtgcgattttatcaaatgcagcctgtatgatgttacttcataaccatccaagtggaagcttaaaaccatcaaaggaagatgtcaaagttacggatatgatgcatcaggtaggaaatctcttacagattccgcttgtagatcatattattatcggtaagaacaaacagttttattccatccgtgatcaggaggactatgatataccaaagccttcttatatcagtgatatcaatcaattgaaatggccgcagacaatgcttaaagaggaacagttttaccaggataagagtaatgcttccgaaaacaaagcaaggaagcttgaagaaatcatggatgaattggagcaaggggttcagtctattttaacaagtgagaattacatgaattatttgaagtttttaagttcctttcacagttatagtctgaataatacaattttgatctatcatcagaaaccagatgcatctttagtagccggatatcgaaaatggcagtccctaggacggcaagtacgaaaaggggaaaaaggaattaagatcattgcaccagctccggtaaaagtgatgacagagaggcaaaagattgattcagagacaggagaaccggtgaaggatgaaaatggaaatccagtgacagaggaagcaagtacaacaattccacgctttaaggtatacgaagggtgaggaatatggtggaagatatgagctcattgcaggaaattgtttgattggtccaacttcagagaatccatatcttacgaagccagctgtaagtcaggcgattaaagatgcgaaaaactatttggaacaaaaagaaaagagtcatgagaagcaggggaagcatttgaaaatcacagaaagatcaaaaacacttcctaccaaaaaagtgaaagaacaggaaagataaggagtgaatgagaatgaatcaatatgtaatctatagagtgaaggatacggagattggaaagaaattaaaacacatgccttataacgaattaggggaattagttcaggaggtaaaggcagagaattatgagcagatctatttcggattgttggaagataataaaaagccatatcagctgcgaaaggatttggaaaagcagattgaaccgggaaagaaattggaggtcggagatgtgattgtaacgaatcgagagggacttgcagtctctcattatgtggataccgatacattgcttactctcccgggatttataaatttgaccgattcagatgcagtaatcaaggttgatacagaagattatgaaattgagcagtatccaggaaaatggagaagcgtggattatctgatctttgaaggaaaaagctattttctcatggaaaatcagaaatatgggaaagatgcagcggcacttgtactgaatcagtatggcaaggtgattcttgatgagtgtaaagatggctttgatcaggatacgatcgataggatgaaatcagctgtccagaagttcaatgaacaggaaaaacagaagggagctaccaaagaacggctttcggtatggcagaaatactttatcaatggggaataccttcgatctgcagaaatggcagaggaacagaattacaatatgatcgatggaagaatcaacaatctgctaccgaaaaaggagaatccagaagtaccaaagaagaggaaatctgtccttttgcgtttgtataaacaccgctgtgaggttgcaaagaaacagggaaagccaatgccgaggcggtatcaggggatggagatggagcggaatcgtaaatagataagaaatgacaaagggtgtgggagaaatctcattgcccttttttgaaaaagagttgtctgatatatatataataaccaagtgagaattgtaaattttgctgaaaatataaatgaagctgaattgaaaaattaaattccagtgaaaaagtaaattccactactatttaaaatttattgaattaacgagagatttttaattaaattctctcgttttctgctataattgatgtaacttatcgaaattttcttgatttcaaggcatgctaaacgggccactggaattctgtgtgcaagactaaattccaccagcctcatttaaaaaatgtgaaaagctaacatccagtctgacagcagatttcgattagttgattagtggttaaagcgtatcagcttaggcgttagattgacttcgtcaggtgtaatcggcttaagctgaaatgctttgagaacatcttctcccaacgtttcaagcgcaacattatacggagttctaccgtttaaaattgctctaggtgtagagttgatgtgatttacaataagatttacatcccactgtgtaagaaattcaaaagaagttccttttggcaaaaccattctaagcagcgtatgagcctgctcaagagttcctttttgtccactgcgcattggatcgcaatagtaaatattggttcgttctattccgttaattcctgtttctaaggcattagggtcactgaactcagagccccggtcagtcaagatgttttcgaaaacagaaataaattcaaaggttcccatacgtttttctaaacgatcaaaaacagctcgcacagcaccttttgtacaacgattaaggagaaatgcaagaaataatttttcctctgtaaaaatcattgttaatagtgttctttgcgaatcacgtgaggattttacagtgtccatttcaacaaaagaatgggcctggatgtcaagagaacgaaaatcagcataggttctgttaataaacacggtacggtctttgatttgggttttatgacacttgcgtggcttaaatttaggttgtcgttttaaatcgatatttcgggcagtaaacaggcccttatcgatatatgtgtacatggagcgaacagacatttccagctctggatgattcgttaggatttgataaggtgattgtccttgttcgatcaaaggtgtaatgatttgatccttttgatgtaactgccgttttgtcatatttattccagcacgagaatcacttaataattcacgatatttatgatcagcaaaccgagcgtcatagcgatatttgtgtgcgatagtacagtgattgattttcttagaacatccattgcatacataaggagctttatctagtcgtttacaccgttctttttcaaagtctttgcatgtttgattgcaagtaggacaagacgtacactttatgccacagagtaagatctttccacaggcattcgttttcttgcaatgatagcgatgaatgcaaaagttctttgcgttatagaaagtacctttatgataccaatcggatactctgtgggaacgaacttctttagaaatcgtagtagggtctttgcaaaggaaagcagcaatgtctttgaatgtagttccctttgctaattcattttcaatatagattctgtcatttaaagtaaggtgtttctgatttccaggtatatatttactcataataattctccttctactgctgtcagaaggagctataacaataacattattatatgaaatagtaaatatctactgtgttagagtaaattccaccgcataagcggacggtggaatttaaaatttcattttgggaaatataaatgaatcgttgataatattgtgcataaaatggaaaaatgataaaatcaaaaacgtggtgaatataagacatattatttttgaggaacagagtgatttagggaatagtatgtctttttagcatgttcaattagtagatccgatttcgtaagtttaagatcaagatataaatatggaaggagcaatatgaaaatacaaaaatatgtgaaaaaagatattataaaagtaatctcaattttaattttactactaggattattgattattttatatttgtcagaaatacaaagtatatcaggatatgttgtacaaattaattatcccaataatattgctataaaagacgaatttgagaatgtatattggataaagccatttggagattttgaggataaatatgagataggggaggaggtaaaagtatattattatccgaattcagaagatggctccaatgaaaatacattatcccattctattgtattcagtagatgatgttgttatttatgaaggaggcaacaattgcggtgctaccggcaacgtatcaaagcgaacgtgatgatacgaaagattatgcttttttatctttaaattctaatataggtaatacgttaggatatctaggctggactacatctgtttcagttggaaacacaatggctttaactggatatgctggagaacatgagtatgaattgtgggaaggaataggacaaataaaatctacaagtggatcctttttaagatatactgctgattcgtcaagaggaatgagtggtggggcgatatatcttacaattccaatgaaagctgctggttttaatcatgggggatatccgggagaatcttataattacggcgttaaaattaattcatctatcgcaaatgagatgaattattataaaaataagaattaagctatataagagaataaagtgaaagccagagatttttaataaatcggggatggttcttgcgattccataaagaaaaattttgaataaatattataatatgtgcagaataattaaataaaaagtgtcaggcggagaaagcaagattaaaataattaataaactttctagcgcctgacattgtagtatcaaaaaaataataaatgaattattgggctataaatgtaagttttctcttgagattacttgcttatgtgacaacaattcctgagaattgtgggatacaatctttaatttttgattctgtttatataaatcgtgtatatcactatttaatgatttataatctgtcaggatttgttttctctgattctttagctgatttaaatcaggataatcgctatcgggataaacggatttaagaaaatttcgtgcttcatcatattgtgctattttatcagaatgcgttttccggtagtcagctttattgccagatttcaacatggaagaaaagtactttttgtttacatgatactgtccaagataatggatctttttgttcaaatctgcaatttgatcctgtaggttatttttttggtcggataaattatcaatctgctttgaaatggtatcggattcatgttgcaactgttctaaggaatcaaattgattctcttgaagaaaaattaatgtttccgccatttgttgcagattactgattttaacttttcttgcatatgcaacattttgttgagcctttacacatttctgtaaatctataaccaaacgtaggttagtaggatagctaaaaatagcaagtggatcattctgatatccaggctgattggacttcttgagctcttttccaattttggaaaggagctcttcttttgaaaatgcagttccaagtgatcgctcactaattgctttttcacgatccggatgtagataactgaaacgtcctcttttatcccgaacctgaattttatattgctcccaaaggatgtttttaaattcttccaacgtatttgatttatagcatagtttgaacaggatctttttataatgctttattttctatctaaaattttattaaaccgactaaagaacgttgaagttgttattatcgctgccaaaatatcactgattggctcagccaaaaataccgcaaatactttattctggataaaatgcggcaggataaaaatcaacggaatcaacagaatcaattttcttaagcaggcaagtaataaactaacttttgcctggcccaatgccatgaaactctgctgacaagcaacttggaatccaagagaaaaaatacctgccatgtaaattcttaacgcccatgccgtatacgtgattaattctgtattattcgaaaaaatacctgcaaacatcttcggaaatagaagcataatcaaccagaagcatcccgtaaaaattgtacaaactgtaaattgagtaaaaaatgctttttttactcgatctctatttcctgcaccatagttatagctcatgattggctgtccaccctgacaaattccctgtaatggtaatgttgcaagctggctaacactggtaataattgtcatagcccctactgcgagatctccgccatatcttgacaaactggaagtaaaactgatagacaaaatactttccgtagataacatgacaaatgtagatataccaagagcaaggcatggtaagatgatttctttttgcagtttaaagttttcttttttaagatgcagaatcgtcttctttcctgacaagaaacgaaggatccatattgcccctacagcctgactcaaaacagttgcgagtgcaagctcctttactccaagatgaaatacgaagataaaaatcggatcaagaatgatattgattacagcaccaatcactgttgtcatcatgctgatctttgcaaatccctgtgtcgtaataaatggattcattcccatcacgatcaaaacaaaaatacttccaagaatataaatccttgcataatccacgccataaggaagtgtcttatcgctagcaccaaacatcgtcagtaactgtggcgcaaaagtaaagaatatcaccgtcaaagctgcggccataagcatgagaattgcaaaacagtttccaagaatcttttccgctgtcttattatctttctttcccatagaaatcgctgcacgcggtgcacctccggatcctgccagcatggcgaaggcattgatcagcatgagaattggcgtaaacaatccaacacctgttaatgctgcggcaccgacacctggaatatgtccgatataaatacggtcaacaatattatataaaaggttgatgatttgagccacaacagcaggtattgcaagctgggccaaaagacgtggtattttttctgtttccatagcttgtgcgtttgacttactgttcatgtctgtgttctcctaaatatttttctagtcattgcaatataaaattgcttatacagtctctcccttaagagtcctggtattcttgataatgtacaaaacaactgatacaaccatcattatagcacacaaatcaattaacagatctgacaccattggtgtaatgtggaaccatataatatgtacagccacagttccatataataaaaaggttactatctttccatgccagtctgcaccatgtacttttcctgtcttttgtatcacaagacatccactaaccgccatataaagttccttaactgccattataacgatcaacgggagcatatgtggaaagcgagtaaacaagcaaatcaacattgctgcctgtgtcagcttatcagccaccggatcaagtatttttcctaaattactaatcctatggaatcttcttgcgatatatccatcagcaagatccgtaagaccagacagcaataagatttcaccagctaacagaggatttttctttacacaataactccatataattaccggaatcagacaaagccgaaaaaaagaaagaagattaggaaccgtaataattctattcaaattttcttcctgattcacttcactctgcatgtacggtcacctcactttccttttttttagacataaaccaataaaatataacacaaaatgctaaagcaaacacaacaccaaaaacattttgaatcactctaagactaaccgctccttgtagtccataagtctctgcagcaatggctaaagcaccaaatgtgttaaatactgcctgccagccatattgtgctgaaagtcctacaccgattccaccaagaattcctatatatgcatagattgacgaaggaagcagaaaatataatactgtaaaacatataacacctgcaatatttccgacaatccttttacggactctgtagtgcatatcttccataaacggcaaaatcgcggacatggccgcaataccagcccacattgcacgtggcatattacaaagttctgcaatgcaaaggacaatcggtacgcataaaatctgacatatctgccattttgttctggaagaagtgatatcaaattcttgtatcagatctttcagatttcttttataagttctgtttttatgatttcgataaaatacgaagcaggtaagtgctgcacctaaagccattccgactaatcgcatctgatagctttttcccgtaacatcataaccatatagcagcagatacccaagaaccaatgtagattgattaaacatgaatggattatggcatccgaacagaatcaacacagccagtgccgcaatatttaacagcattcccaataccggtgaaaaccgatttgctaaatgcggacatacagtcataattacaaagaacaaagccaaaagcatcgtagattgtccggtgtggatccccagatccgcattccgaaataccataaggcataataaaactactacacccacaatactattctcatttccaaataagatactgaaaatagtaacaaatgaaaaacaaaatgccattgtaacagctatctttaccaaatatagcagtatatgatatgatttttctttcactgtttcactctttttcaacagatttttagaacctgcctgatttaactgcaattcctgataaaatgtcatgtaattcctcctctatctgtttttcttaaacttatatggcctcatctttctgtattggaagctctacaacaaatctgcatccaccatattcacggttttctgctttgattgttcctccggcactatctacaatccgttttacaagtgcaagacctaggccatttccttctgctttatgagatccatctacctgatagaacttgtcaaatattctggattttacatcatcctctattcctggtccttcatcttccagaatgaacttaacagaatcctgttcttgtttcagaaacatcgtaattgtcccctttgaagggctgaacttaatcgcattatccaaaagatttatccagatatgcataaaaagtccttcattcccagtatatttaacttcctccaattctacctgaaaaccaatttctttttctgtccattttgtttccaatgaaagaaatgcctggcggatctgttcatccagacgatattctgtttttttcattggtatattctgattctctaacttggataacagcaaaatattaccaaccaatccggaaagtctttgggtgttaaataagattttttctacatattcctcttgatccggagacagttcttctccctgaagcagcattgtatatccttcaatggcattaatcggggtcttgaactcatgagaaacattagatacaaaatccatctgcagcacctctgttgcacgaagttcttttgtcataacgttaaaactttgataagattctccaacttctgctatacggctgttcgtttccaaatgctgttcaaaatctccctgagaaacttccttcattgctttaccaagtctggtaattggttccagtaactttgcattgataaaggaagtgatcagccctgcaatcaatgtattgaaaatcaaaagccagccaagcacaggtatgctgcccggcagattaaaaaaatgattcaaaaaagcaaataataaagcagatatgactgttgaaaatacaagtgccagccagattgcaccagtcagacaggatcggatccgcaatcctttttctttcttttgttccattattttttcaccaccttgtatccaattccacgcattgttacgatttcaaaatcagggttatctttaaaacgctctctgattcttcctatatgtacctctatcgtatgtgggtctgcctccgtctcgtatccccatacttcatccatcaactgttgttttgtaaatgttctgcctggcgaagctgcaagcttatataaaagcaggaattcttttttaggcaaaacaagactttccttatcagttgtaaccgtcattgcatcataatcaaactctgttgaaccgatcacaattttgtgttcattcagtatctgtgcacggcgaagcagtgctccgactcttaaaaccatttcattcacatttaccggttttaccatataatcgtcacttcccgaaagaaatccctggcgcatatcatcaaaggaacctttcgcagtgatcataagcactggtatctgatatcctgctgagcgaagttctgacaccagttcatagccatccataaccggcatcataatatcagaaatgatcagatcaatatattccttatccaatacttctaatgcctgtgctccatccgatgcacttttgacttgatatccattcttctcaagcactttttggaatagctggcttaattctttatcatcttctacaattaatatttgaaacacgttttccttcctccttattaaaacagataccttgcccatccaagcagatgctgtaccaaaaatatttttctctgacgtttctttgttaattcgatcggctctacatgatatggatcacgataggttccattttccaatacctggcgggacactctttcatattccatcatgccctcttccaactgtttattaatatctttactgcgaattacaagcatcagttccgtatccagatatgcacttctcatgtccatattaaaggaaccgattacagacagatcatcgtcaatcagaatactttttccgtggtatgaataaccgccttcatattcccagatattaattcctgtacttaagattctatttctgtttttcgcataatcggcagccccaaatggattcccattattcgcaactgaatttgtcatgatagaaaaatctgaaacgttctctgcaatctcctcccatgtattatacatcatatcattacagataatatatggcgtgtggatcttcacacgattttttgcatttttcatcaattctcccaactgataccacactactggttctttggaacctgtgtgaataggatttgacactaatgcaatcttttctgtctcaaaagtttcgtccgtgtaatcggtatcgcagattctttccttattctcttcaaaatatttctgatagccgttctgcagctctaaaactgcgttctttacagattttctatttgccagttttttattgtcatgaaaataaccactgtcttcttgttcccatatcgtttcaaaatactctaacaactggttaactgaattttctttctcaggttcatcgcaaaccactaacacgtctctgtcatagttcttatgtcccggaaaatcccccaggaaataattgtatgtatttcttcccccaagaatatatctctttccatctgcaatcaaatatttatcatgcattctacccatcattttccacggtttcaacggattggccttattatatagtttaatttcaacattctcatgggaagataatccatagaaatacggatttccttccatatcaatccagctctccattccatctactaacagacgaatatgtacacctctgtctgccgcatcatgcagtgctcctaagatcaattttccactttcatcggattgaaatgcaaaagtagaaagaataatttccttttttgcattcttaatcaaacgcactctttgtaaaagcgcttctggattcttttctatgattactgcccgttctgtattttcactgcattcgttccatgacccattttttgtttcttttttggttgtattggacacttccggctgctttttatatgcaacgcagattccgagcaattcataaaaagccacacataaaaaaattgccagtataacaagaaggattttacatattttatgctttttcattgtacatcacctgattcctttttatttcatacttatacaatacaaagtcaatctcaatttaacctcaacaaaatttatttttcataaaaaatatgaccggcttctttttaatgaaacagtcatatttttattctaatatatgaaggagcttttcttactccgttgtattaatcactatccatgcaaaatcttctttgtacaacagactgctagatatagcaaaaacggcctttcaaaaacagttaacttctaaatcaactgttttttgaaaggtcgtttcatcagattcttatagcaatccagcaaataatctcataaataattgtcccagtcgcaaatatgcacttcgtccggtttgatattggtctgtcacatcacgacattctcccatcgttcttatcagatcattttttatttccacaactgcctgacaatctgccataaaacagccgttttcaaaatggtgatataaacttcgataatccagattaattgttccacaagttgccatacagtcatctgccacactcatttttgcatggcagaaaccaggagtccactcataaacacgaacaccatgtttaactaatccatgataaaaagaacgagttatattataaatgaattttttatcagggataccaggtgtgataattcttacgtctacccctcgcttagcagccagacataacgcatgcgtcatttcatctgttatgattagatatggagtcataaaccaacaatatttttcagctttatttatcatactgatataaacttcttctcctacttgctcattatccatagggctgtctgcataaggttgaacaaacccagtttgctgtgccgcataatcatagtggaaaaggtatttactaaaatcagaatcattagcatccttatcacttactgcattccacatttccaaaaatgtcaccgtaagcgactgaacagcatctccttctaaacgaatacctgtatctttccactgtccatacgggtgtgtgtaattaaaatattcgtttgctagattatatccacctgtaaatccgacttttccatcaataactgttatttttctatgatcacgattgttcaaaaacagatttaaacctggcataaacggattgaatacacggcaatgaattcctattgcctccatctttttcacaaaatctgtgttaataaagcctatagaacccatatcatcgtagaatactctaacttccacacctgcttttactcgctcttccagaacatcttgaatcttatgccatgcttcagcgtcttctatcgcatgatattccataaagataaacttctgtgctttctccaaatccttaatctgtgcctctaatcccttcactgcttcatcaaaatacacaatatccgtattctgatagattggatactgcgaatttctttgtatgtaacttgctatatttcctgctttcggaattgtttcttttattctgctcaaacactcctgactgtccggaagcattggtaacaatttgctatcaatttctgcatatcgctcacgcattttatgtgtgccaccattcaaaccaatcaacaaatacaagcctacacccataattggaaaaattagaattaagatgacccaaggcattttcatagaggatgtcttatttgatgcgtacaatcccaaaaccaagatcccactcaaaatccttgtaaataaatttatgatttctgcatattcattcaagcgtgttacgatagtaataataaaaatcacttccagaagaatgcagattatggaaaaacacagccgttttaccccattttttgtttttgcttttccctctaaagtatcttgtttcatatatattccaccttcctacttgctcagttttctccctaaatttcgtggaacttaccaattttgtcttttattctctgcatttcattatctgcttcaatgatagctcttgcagaatgaagtaattcttcacttatctcatcatagccaggcatttcttcaattccttttttatagcgaagttgatgttccaatgttgcccagaaatccataccattggttcgaatctgtaattctacacgcataggtgttttacccttagcaaaaaatactggtatttcaacaatcatatgatagcttcgataaccattcgattttggattttttatataatcttttatttcaataactttaatatcatcctgttgggtaatcaaatctgatatcatataaatatcgtcaataaacgcacaaactattcgaacgcctgctacatcattgagatatgtctgtatattttctgttgtaaattcatatcccatcttctgcaatttatcgtaaatactattgggctgcttaattcttgtttttataaaagaaataggatttcgattgttctcaactgaaaattcatcatccaaaacctcaagtttagtttgtatctcccgaatagcacaacgatacatcatcattaaattataaaattttgtagcattatttaaaaactgtagtgattccggactgttcatcctgagtttttttacttcatcttttatcatggaactttcctttctacctcatccctgatttcaaaacattatttattttgatagttgattcgttctccttgaattactggataacaaatcattttatcactatccagattttctacatgcatatctactgcactgatctgatggtttccataagtattgtaataataaataccttttgtaacattacaacacgacgtatacaatgtgatttcatattttccatccgctacttcgcaacatcctcgttgctgatccacagatccgagaatgtggaagaattggctaacgctttcttcctctgattcacctgaaattgcatttacctttgtaaaagctacacgtacaaagcgtgaggaagatgagagatctcccggaagacctaatcctcccatacctctactatatgcatcaagagccaaattttcgcagaaagtatttctgggctgtttaggagataaatacatataattatttagttgaaacatctgctgtggaaatggcggattattcgtaagcactcctactggattgtcataaatatgcaaaccatctgacatagattctaccgtaattgactcattctcatcagaaatgatccagtgtaattgtgctaatggtaattgctcgctgaaaggagtattaacaatattaattcgttcaagaagctcgcgaacttcaactaaagaagaacactgacttaaaatccacggaataaattcaaactgtgcaatattttccacatctggcttaagcgcagcataaacagcatttccgacaaaattcagtcctgccattgccactcctttttcattcatagcatcataatacaaaggataatcctcagcaacatgagccattccaataattgcataatgatttttcatatcgccaacatggcgaaaattaaacgcataattacgtggtgtaattactatctgatcaccataagagaattcataatcgagggttcgtccaaagtaaaaatcttttgttttataagttgctgctgtacacatgatcgtttatcctcctaaacagattgaaatatgtcaatgagctttttcttgaacaatattatatcacaattcttttattttgttccaacttcatacatgatcataacatgtaaactttaaactattttcctagattatttctccatcagtttttcaaaccaggtatccatagctaggatgaattgacctacgtctggcaattcttgcagcatttcgtttagggttttgtgcttcacatatttctgcatatacacccaacaggcaacgctactggcttctgatacaatgccagctatggttttgcgcataagctcttcaaattcagcaatttcttctttcggaacaacatcatacagtgttggtgcctgatgacttatttttactccattttcatttgcatctttaagcagattcttaactttttctcttgaatcctccggtactttcatgtactcccacataaatgctaccacatcggctggtgtgtctttttttagtggtggtaactgaatataatcattgttttcgctcattttcatatcctcttcacgatataataaaatcaataatacgttctcttgtcatgtccagtacagtgtccacgaatactcctgcaaacaggatcagatacagaattacactcagcgaaaatagaaatgcaacctgtacccagtcatgataacagtatgcagtcgctataatcagcaaagtgaatagaaacccaaggattcccctgacaaccgcataagtctgtactgtcatcttcactgctaggccgatcacaaaaaggatcagccatactggcagtaataatatcttcccagcaagttttaaaataaacatgtgtacctcctatcttaccagtcctgcatatcatggttcaccgctgcctggtaatatccctgcatggttgccggagcattatacaatgcagcgagtaaatatttcttaatgttcttgatttcggttgtatttttcttcatgctggaaattacatactggatatgcataaagtttagtttcatgaatcgatttttaacaaattctgttggtagttcattactggcaatcactaacttttttccagtgtatgctacagtctcaacaatcaactcatagattccctgtacgagttgtacttcgtttgggtaactctgcaaaagaacatcataatcgatattttgtttgactgtctcttccaagatagaatactgttccatctcatcacatctgatcttatcatcttctgattcttgagccacagataggataagattagattctgtattactcttgtaagtattattagaatggaaaagacaaaggagctggttacaattgtatgtactcagctcctttgtgtataataacacaaggaatgattcatcaaccggtatcctaagctaaaacaaggaatgaatccctataggaacatagaatattttgagaaacgaaaagaattcatcaggagaaaaagaaaaatagcaaagaatcgagttgccgctgctaatcctacttatgtataaaaggattagtagtcatcaaggctcgagccgtatacagggaaacttgtaaaaatataatggatggctgcaacttttttcatatgacttttgtatataaggtaaagagatgaaaagaaggtggggggtggaacgtattgagtaattattatgatgagaatgaactaattagacgaatccaaaaaggagatgaatcagcgttagcaataataatttcggaatatcatgcttatgtcggaaaaattgtatacagtatcttaggcagttactctcataaaattgatcttcagggtgtggttaatcagatcttttttaccttgtggcataaagctaataaaattgatccatcgaaaagcgttacaataaaaggttatttaggcacattggccagaaatacagctataaatgaaaagaaaaaatgcataccagattaccagataaatgatgaggtcatagcagatatttccgatgattttaaccaggttgaattgagattactgctggcgaatgctctgaggaaactgaataaggatgagcagttaatattagttctgttttattttcaaaatgagaaaatagccgatatttcccgcattacaggtattccggcatccacagtaaaaagcaaactcaaacgctgcaaagagaagatgaaaaaatttttggaagaaggaggaaatcagtatgaaaatttcgtataacgatatgtttactaacatttcagatgttgcttatgaaatattagaagaaaatgatatgtttaatgatgaaaccgatgatatgttttcttcagatagaacttgtaaagatgtaacagatatgatccatgatcagaaaatcgtgagaaaaaggcattttgctatcaagagtgttttactggttgcagctcttgttgcaatgtcgtctattcttgctattgctcacaactacggtgcagcattaattgatgacagcaaccggcatttagttggaaaaggacttcatggagaaggacagataataggagctgatgaagagatagaggttccggatgaaccttcagatggaatttgggaaacaacagctcgtattaaatcatacaaaaatgtaagcattagtccaaacagtataacagaatttgctgtatccggtgacgccggacaatatattactccggaaattatatttggcaacaatgatttagtcatttttgagcaggaagacggatcaggctggaaattaaatgagggagaaaccttaatgattcaggcaacggaatatgaagcggaaacaaacggtggaaatggccagggaatcatgtatttttatatctgtgacggtgaaatattagatggaaaatcagagcctcgtaaagaattaaatcaaacctttgaattaactgcagaaaaatccggagaatattatatctgtcttttaggtgtaagctcagatcctatatctttaaaggaagggaaaatagttattaaatagtaaaaaacggttatgagagagagtgcgattaccaggttaggtgatcgcactctctctcatttttttgctataggaaacttcaaattttttaaaattatgcaacttttttaatgttccattgtatatataggtaacaggaagtgtgggaaataaaggaagtaaaggaggtaaatgtttatgaaaacaattttaaagcgaacgattggtttttttctttctcttgcaatgataatttctgtagcatgttctacggcggtcgcagcagagacaccagaagatcaaatttacatctcccaataaggggtgacaacagagcggaaccaaaatgttagctggacttcttaaaacccatgtttgcaaaccggtaattttgattagctgtcagctaacaaaaatcggattgcgttagctggaaattgatcattttgaatggaattttatgtcacgaatgtgattagaaaataacaaaagcgttcgttgtcagctaattcagctaacattttcgaacgctttgaaccgtccctggggggattcgaacccccgcaaaaacccgccttaggagggcggtgctctatccagctgagctacagagacacatgacgcaaacccttgattttactgggtttctaggatttttccctttggggaatgcctcggtcttccttaggaggacctcgttatatccatttaactaagggaacaattgtatctgtattccagacacagttaatatcttatcatagaacctacaaattctcaaccgtttttcatctatttggaaatgaaccgtgttgatggaaatacgagagaaacttgatgcaatcgggatatcgtctgaacaggtagacaagaatcaagtagttgttaagcatgttaaaatagatgggaaacactgtagatgtatgacgagacgggacgatagttatattgttgccgtaacagtggaggattctgtttatttacagggaactcttttagcaatactgatagtgggcacttatctggtattggcgacatgctggatgatgtatatgctctcgaaagttataaaagaaagggatagaagaaaataaagccggtgcaggattcatttcctgtatcggctttactgctcctatcaagactctctatgtttctcaatataatacggaacgcaggttgtgaagaaatcaagaatcgtatctgcataagaagtatcatcttttggaatcgcatgaagtacctgttgaatcgcgaatccatcaagtgtagccataaagatagaagcgaattgttctgcaagattacgatcatcaagtgcaaatgcagaagcaaaaagcgtagcagcctgatccaggatcgacttcaatccggaggtatatttctgggaaaattctgaatcacatttcatcgcatctgataatagaagtaagtatagcttttcttcctgaaggcgtttgaaacgaatccgagcttctttttctacattagaaaagagagaatctacggtgattttctcgttttcattttcatgaaaaatacgatgtgcgaaatgaatcgaatctgtgacgatttcgtcaaataaatcctgtttgttcttataataataataaatcgcgccggttgtcatattggcttcggcagcaatcgagcgcatacttgtcttatcaattccgaacttttcaatctgtcggattgcggcttgtttgatctgtgttttggttgtgtttttttgttcattcatgttctttacacctcgaaatgaattgtgttattactcacaaaatctgcatcatccgtgtctcttggcagtgtggttgacgcgggagtgaacagtaacatgattatagcataaaaaaagataaatgtaacaacgatatttgtttgacaaagtacataacaagtgttatgttggtcttataggaaattattataatttatgaaaagatttatgaaaaaggagagggaatatgacagacaaatttaaaggctggtatccggactatattgagaacgaaaaagaacgtgaaccaatcttaaaacttgccaagatgatgacagggcgtgcaaagaaaaagctcggattagagaagatgacaaagtacgatccggagtattggggactggcacttttgtgtacagatgagcaggctgagatcgcattgaagatgggggtgcgccagccgaaaactttagatcagatggtgaaggtgactggtaaggacagaggttatctggagaagcagttagaggaaatggcagaggttgcgctggtggagtataactgggaaaatccacagcatgagaagcagtatgtactgccgatcttcgtacctggaagtgcagagttctcttgtatgaatgcgaagatgttagagaagcatccggagcttggacttttctttgagagaatgagtcgtattgcactggaaggacttgcaccatttatgccggaaggcggtgttggaatgcatgttattccggtagagaaggcaatttcaacagagaatcagtctctgccaatcgagcacatttcacattggcttgaaaagtatgagggaaaatatgcagcgagtccatgttcttgtagaagatctcgtaaaacattcgatgagggatgtgcggatgatccggaagaatggtgtattgcggtgggcgatatggcagattatatcgttgagacaaataaaggtggacactatattacaaaggaacgtgcgttagagattctgaaacaggcagaggacaatggtttcgtacatcagattacaaatattgacggtgagaataagattttcgccatctgtaactgtaatgtaaatgtctgttatgcgcttcgtacttcacagttatttaatacgccaaacatggacagatctgcatatgttgcaaaggtagagacggagaactgtgtggcttgtggacgttgtgtagagtattgcccggcaggtgctgttaagcttggtcagaagctttgtaagaaggatggttctcaggtagagtatccgaagcatgttcttcctacagagaagaaatggggaccggagatgtgggacgaagactatcgtgataagaaccgcatcaactgttatgatacaggtacagctccgtgtaagacagcctgtccggcacatatcgctgttcagggttatattaagatggcagcgcagggaagatacagagatgcccttgcactgatcaagaagaacaacccactcccggcagtctgcggacatatctgtaaccgtcgctgtgaggacgcatgtacacgtggaacaatcgatcaggcaattgcaatcgatgaagttaagaagtttattgcagctcaggatctgaatgctgagacacgttttattccggagaaagtagttccggcaacaaaaggatatttcgatgagaagattgcgatcatcggtggtggaccggcaggtttatcctgtgcattctatcttgctgaaaaaggatataagccgactattttcgagaaaaatgagcgtgccggcggtatgctcgtatacggaatcccatcattcaaattagagaaggatgtcgtacaggcagaaatcgatattatcaaagagatgggggtagagatcaagactggtgtagaagttggaaaagacatcacattagatgaacttcgtgcacagggatacaaagcattttacattgcaatcggatgtcaggggggacgtcttccgggaatcccgaatgatacagcaaagggatgtgcatctgcagttgatctcttaaaagaggtgaatgcaaatgaaaaatacgacatcaagggtgacgtagttgtcatcggtggtggtaacgtagcgatcgacgtagcaagagactctaagagatgtgcaagtgacgatacaaaggtaaatatgttctgtctggagtccagagagacaatgccggcttccgtagaagagatagaagaagctgagtcagaaggaatcgttgtaaatccgggctggggactgaaggaagttctcgtagacgagaatggtgaggtccgcggtgttgtattaaagaaatgtctttctgtatttgatgcagaaggaagattcaatccgacatatgatgagagtgagcttatgacagtagaatgtaagcatgtattcttctctgttggtcagtcaatcgtatggggtgatctgttaaagggaagtaaggtagaacttggacgcggcaatggagcagttgcagacgagcttacttaccagacagcagaaccggatatttttgttggtggagacgtttatacaggaccgaagtttgcaatcgatgcgatcacagcaggaaagcagggagcaatctcaattcatcgttttgtacagccacagtccagtcttacaatcggacgtaacagaaatgatttcatcgaattagataagaatgacatcaaggtggagaattatgataattccagccgtcagattccaggacataatgatgcaattgatacaaaacattccttccgtgatgcaaagcttttatttacagaagagcaggtgaaagcggagacagcgcgctgtcttggatgtggagcatctgttgttgatccgaataaatgtatcggctgcggactttgtacaacaaaatgtgagtttgatgcaatcaagttacatagagaacttccggaatgtagcagaatggttccttacgaggatcgtctgaaatttgttcttccgaacatggtaaaacagtccatcaaactaaaatttaagaagaaataaatttgaaagaaattaaagtaactgttcagagccaacctccaaaatgctacgcatttcgtcggtgtggcgtatccgccaaggaaaattttaaaaggaaacaagggggaaaagtaaatgggaatactttataatgtacctgacttaaaaacctggggaattatgttctttatcctcgtagtcctgatcgcactgaatgaattaggacgtgaaacaaaatggggtggaatcttactgtttgtgattgttccggttgtgctgacaatctttgtatggccgacaacctgtgcgccgggaaatgagtacggaaccggaaactggttcaactgggcaaagacttactctgcacttgcaggctgtgttggtttcatgctaatgcgttatattccgaatgcgacaaagcataaatgggtaatctgattcccgccactgattcttgcaatcaatatttgtgaggcagttttccgtgatttcgaggcatacagcttccatgcatttgcaggcgagaagataaacaatctctgggttatgtcaggaccgtggaacatcatgaacggaatcgcaggtattttaaatatcctgctgatctgcgggtggacaggtatttacatttctaaagagaagagtaaagatatgatgtggccggatatggactggatctatatcctcggatatgatctttggaactttgcatatacatataactgtatttcagaccattctgtatactgtggtgtgattctgctgttatcctgtactatccctgcattctttatcaagaagggatgctggttacagcatagagcacacacactggcactttggattatgtttatcatgacagttccacagtttgcagacagactggcgcctgttccgacaacacataatccgaaggcattctttgctgtaagctttctttctttagttgtgaatgcggcagcagttatttaccagttcagcgtaatccgcaagaataagttgaatccgtttaaggatgagatttatacagacaaagcattttacaagaaaataaatgcagagaataaataaattgataataaaaagtccaaacaaggattttttgcggccaaaaacagaaagtatttatcaaaataaaaatatcctgaacaagttgcagagccagaaagccttgtaactgtcaggatatttttgtttggtgctgtcagctttaaaaaacgttatttaccgacagccccttctttatgtgagatacataacttactggaaaatgtcttaaaaaatcaagaaaaacatttaatatatgatatatttacagattttggctacttttcatctggatttggcaagaaatgcaccttcttttcgcctataatgcaattgtaaacgaaaaggaggtgtttagagatgatgaagagaattaaaagatggctgcatgagatttatgaagaagatatcaagttcttcggacagatgaacggaatgtattttcgataagcactagaaaaagaaaataaaagaaaaaaggagaaagaaaattatgagaaaattagcaaaatggtttgaagaatcacttgaaagttatgtaaaattaatgggtaatacttatggatggggcggaagattgtaagccatggaatatacacaaaaatcaaatcaaataaacaataaaaaataagggtagatgtcttgagagaagatatctactcttatttttttatatatagcaattcttcacaaatgtgattctatccgtaaatgattgttttattttctcaaaaagtatatacttgtttcatatacatttacgttattttgagaaaggagcaccttttaaatggactctatattatacgaaaactatctgaatattcttaaacaggaactggtacctgcacttggatgtacagaaccgattgcaattgcctatacagcggcaaaagcacgtcagattcttggagaatttccagattctgtagaaatggaactcagtggaaatattatcaagaatgttaagggcgttacagttccgaattccggaggaatgaaaggaatggaagtggcagcagttcttggtatcgtagggggaaatgcggataaggcactggaagtgttgagtgaagtgacttgtgaagatattgcgaaaacgaaagaactaatcagtcagaagatctgttcctgttctttagttgaaggagttgataacctctatattacagctaaagtaagaaaaggagagcattttgcttctgtaacaatcgaacatcagcacacgaatattacaagaattgaaaaggatggtgaagtgctgttggataatccttataaatcagaggttaagactaccgtagataaatcgaaacttacggttaaagatatccttgattttgcggatcaggttcgcatggaagatgtgcagccgatcattgatcgacagattaaactgaattctgcgattgctcaggaaggacttgataataactatggagcgcagattggtaaaacactgatgcatgtatggggaaagagtgttactacgagagcctgtgcaagggcagcagccggaagtgatgcgcgtatgggcggatgttcgatgccggttgttatcaattcaggaagtggtaatcaaggcatgacggtgtcgcttccggttattgtgtttgcagatgaatgggaagtatctcatgagaagctttgccgttctcttgttgtcagcaatctgattgcgatccatcagaaatattatattggaagtctttcggcgtactgtggtgcagtcagtgctgcctgtggcgccggtgcaggtattacctatatgtatggtggaacctatcaacaggtttccctgacaatcatcaatacacttggaaatatcggaggaatcgtttgcgatggagcgaaaccttcctgcgcagcgaagatagcgacatctgttgatgctgcacttatggcttttcagcttagtattcagaacaaaagtttcctgccgggagaaggtatcatcaaagatgatattgaagaaacaattaagagcatgggatatattggaagagttggtatgcgtactacggatacagagattctgaatgtaatgatagaccgtgcagacatcaatgaggagtgctaaacatgaataattttatctatgaaacaccaacaaaagtatactttggaaaagacgaggaattaaaggtcggtaagattattgcagaatttcatccaaagaaagttctggtacatttcggtggaaattcagcaagaaagagtggactgcttgataaggtggagaattgtctgagggaagaaaacatcagttttgtagagcttggcggagtagttgcgaatccggaacttccgcttgtgagagaagggattgagcttggaaaaaaagaaggtgtagattttgttcttgcagtaggtggaggttctgttctggactcatctaaggcgattgcgaatggactggcgaatccggaagtagatgtctgggattttcattgtggtaaagctgttccacagaagatgctttcgaagggagcgattctgacattggcggcagccggttccgagatgagttcttcctgtgtgatcagtaatccggaaacaggagagaaacgtggctgtaacggactctttaaccgtatgaactttgcaattgaggatccggttcttacttatacagtaagtccttatcagacagcatgcggagcagtagatattgcaatgcatacgattgaaagatatttctgtccgggtgaggatacctatctgacagattcaattgcagaggctgtgatcaagagtgtacgcaaagctgcaggagattgtctgaagaatccggaagactatgctgcgagagcaaatatgatgtgggcatcttcacttgcacataacggacttacacagtgtggaagagagttccagctcgttgttcatcagttagagcatgaagtatccggaatgtacccggaagtagcgcatggagcaggacttgcagcgctgtggtgcagttgggcaagatatgtttataaagcaaatataaatcgctggctgcagtatgcatctaacgtatggggactggatattgattttgaacatccggagaagacaattgaaactgcaattgatatgcaggagcagtattatgcatcgatagggatgccaatcggattaaaagaacttggtgtaaaagaagaggatcttgcgaaactggcacttgattgttcaagaaacaaaacgcgttcattgatcggatataaaccgttggcatatgaggatattctggtaatttatcagatggcatatgagagaggttaataacagttaatatcgaaagcgctgcttaatgcggctgctttcgatactctcttggtgacatatggtatcgttcctggaatacgcggttgaatgttctctgactgtcgaatcctgtccggatacagatgtcgagaatcgtatggtcgctgtgaagcaggagactacaggcgtaatccaatcttgcttcattcagataccggttaaaattagtatgaaatgtgccggagaagacacgtgataaagaggactgactgattccaaggtcatgagccattttggaaagcgtcagttcttccgtataatgtgcagcaatataagaaacagtctggtagataatgtcattacttcccacactgctcttatcgatcatttcaaataagggaagagtgcgtgcaagtataatctgaataaatgcctgatgcagaacatgcccttgtgaagcggctggatagaccagcatgcttcgcagggcataatttacgtctgggtgtacttcttgagccagaattaccggatttacaggacaaaattgctgtaattctttcgtataactaggagcaagaagcggtgaagcaagtgcataaatcgccttacaggattcactgttgaatacctgatagtggtggatcaattccggaaatacaagtgcaaaatcgcctttttccatatgatacaattcagttccgactccgatttccagtgtaccttctgtcacggatacaagttccattgatttgtgaagatgtgggggaatatggcaagaaatctgttcagcgatttccagtgtttcttcattttcttcgtaaatcggtttcattttttcctgcctccgggttaattgtttagaatagttgatctaatagtatcatgcgtgaatatgacatgcttcacaggcggatggcgttgtagcacatccgcttaatgctgtctcacgcagttcaaccggaagtcgctttccgactttgtacattgcctcgagcatttcatcaaaaggaatgagctgagaaatgccggcaagggacatttcagctgcaatcagtgcattggcaaccccggctgcgttacggttctgacaagggtattctaccagtcccccgaccggatcgcagacaagtccgagcatattcatgagaactgtagaggcggcatccaaacattgcttaggagttccacccataagttcaacagcggcagacgctgccatagcagatgcaacaccgacctcagcctgacaccctccgacagcaccggcaacagtggcatttcgcatggcgaggtaaccgacagcgcccgcattgaagagaacctgctgaatctctttgtcggagaaatgatatacttcctgaaaagcgagaagcaatcccggaacgatgcctgcggaaccggcggtaggtgaagcaacgatcagtcccatggacgcatttgtctcaagggttgccatagcataagtgatagctttctcaagcagttcaccgcacagtccctgaccactggcagaatgctgtgcaagtttttgcgcctctccgccgatcagcccgcccatggaacggattggtttttcaatcggagagcgggcagcttctttcatgatttcaagaacacgcgccattttttgatccgcttctttagcaggacattctccggttatgatctctcgattacgcataacttcagagatagaaatattctgttcctcacatagtgtaaggagttcgtttgcatttttaaaatccatataaaaaacctccttgaatacaatcacatctgtacgaccataacatccagaacatgttcgttctggcggatggtgtcggcaatttcttccggaagttttccgtcggattctacaatcgtgtaagcagtgtgtcctttcgattcacgaaacagacgcataaaagcaatattgacccggcggtcgctgagacaactggtgatccaggcaacaacacccggaacatccttctggacaacaatgatagcactgtattcaccggtgaaatctacttctacatgattgatctgtgtgatgtggactttaccgccgccaagagattctccacggatcgtcatctcctgaccggcagtattggtcataataatatcgacggtattcggatgaatatcagtttcttcctcattcggagtaaaagagtatttcagtccgttttctgtagcgatctcgaaggaattccggattcgcatatcatcagtggaaaatcccatgattcctccaagaagtgcgcggtcagtaccgtgtccgtgatacgttctggcgaaagagccgtagagaataaattctacttttgcaagcggtccgttgatcatcttctgtgcaagataagcaatgcgtgccgcaccggcagtgtgagaactggaaggaccgatcatattcggccccataacatcaaaaacgctgataaaagacattttaaatagcctcctgagtttgtatatatgagtttagtatagcaagtgcggcggtggatgtaaactatgagaaacacgatccgcgtaaatgctgttaggggcagttactgcaaaccgtaactgcccctaagtatgatacttatgcgaattagttctgatcaagtacggactggatctgcttcatcagctgatcgtagtttgactgatcatcgatgccacccatgaatggctcgccaacaatatttccgtctttatctacaagaactgttgtagggaatgccatgatgtttccggcatattttccaactgttgaattagaatcgaaagtcaggttcttgtaagaagcgccctgtgctttcagaatttcttttgcttctttgattccagcctcattgttgtctaaagtgtcagtgttgatacctacaacttcaccgcccatttctttgagcttctcatttaattcattcagtttggaaagctctccgacgcacggcttgcatccactgaaccagaagtttacaactgtaactttgtttttagcaaaaaggctgtcgtctacatcattgccgtccagatcttttcctttgaaacctttgaatacacctgtggactcatctgatttagaggaagcgttgtcggaggattcggatgcagcgctctctttctcgagttttgcaatctcttcttcgataccgcgaattgtttcaatgtctttgctcaaagtttcatattcttcttcagagaaagagtctttattagattcaactgtacttgcaagaaagtcagcatagttttcgttcatggcatcaccgtcagtgttcttgttcataagaccaaagactttgtcccatgcatctttgtgatcagcaaaaagctggttttcctgctggtaaaggtcgttcagtttttcgttcagctcgtctgcgctgcccgtttctgttgtggaagaagattcctgttttgtgtttgtgttgtctgttgaggaggaatttccgcagcctgtaaatgcaaaaagtacggaaatagcaagggatgcagcgattaccttttttaatttcattgcgtttgttctaagtgttttgtttttcatgattttaaatctcctttaaattacattttgtttgttttagtttatttattgtcagcctttttcttgtttgaaaacccataatgatagcagattgcgtcagtcggacaggctttcatacattctccgcagcggatacactccggatggtttggtgtgtctactacgttgacatccatcttgcagacacggctgcatttctggcagccaacacatttctcatgatcaacttggatcttaagaaaagataccttgttaaacagtgagtaaatagcgcccagcgggcagatccatttacaaaatggacggtaaaacaagatgctcaggatgatgaaaagcgcaaggattgtgaatttaaatgtaaataaatgtccaagcgcggaacggattcctgagttggcaagtgccagtgggattgcgccttcaagtactccctgcgggcaaatgtatttacagaagaaaggatctcccataccaagtgaattggttacaaatgccggaagcagtataacaaagacaaccagaatcacatatttcagataccgcagaggcttcagctttgcggtggaaaatttcttacccggaatcttatgcagcagatcctggaaccatccaaacggacagagaaatccgcagataaatcgtcctaacagaacacctaacaggatgaaaaatccagtgatgtagtaagtgaacttaaatttggaggatcctactacagcctgaaatgctccgatcggacaggcgcctgtggcggcaggacaagagtaacagtttagtcccgggacgcacatcgtctttacatttccctgataaattttccctttgaatagattcgggatatgaatgttggtcagcagcgttgcagctgcctgaatccatccgcggaagcggaccagagggtttttgcttgatttcattttcttatccaattccgacacactccatacataattttattgccttgctaagcacaaccgcagcttctccgcggaagattccgacaaggaaaaataccagaccagctgcaagtaaaagaatctgtgttactttttcagatttcattaaaatactcctttcaatgttcaaagtccgtttattgttactgctcactcccgtgtcaatcactccgctgattgacacggaggatgcatgttttggcttgaatgcatctcgccccatcgccaaaggcgatttaaaatggcgagatgcgttgctgatcgcacatcgtgtgaacagtaaccgtttattgacctttcgatgtttgcattatacaatagagagtgtaaaatttctgttaagaaaatggagaaaaataaattgagattattagtagttgaagatgagaagaaattatgtgatatgattgcgaaaagtctgcatcaggcaggttatgaggtagacacgtgtaatgacggagaggaagcactggatatgatttatgcggaaatgtatgatctgatcgtgctggatcttaaccttccggggatggatggaatggatattcttcgggagcttcgcaaggaaaatgaagagacaaaagtattgatcttatctgcgagaagtcagattgcagataaggttgacggtcttgatgcgggggcgaatgattatatggaaaaaccatttcatctgcaagagctggaagctcgtgtgcgaagcctgacaagaagaaagtttgtacagaaaaaagtctgtcttgaatgtggcagtcttcgttttgatacaaaagaaaggactgcatatgcaaaagacaagccggtcgcattgacaagaaaagagaatggaattctggagtatcttcttttgaatcagggaagaccggtcagtcaggaagagttgatcgagcatgtctgggattcttctgtagatagtttcagcggttcgatccgagtgcatatgtcttctctgagaaagaaactgaaagcaggacttggttatgatcccatcgtgaataagattggtgaggggtataagataggagatggaaaagcatgagaaaaatatcgctccagtggagactgacgattcttacaaccgtgctgattacagtattgtgtggatgtctgacatttttcctatataagaatggtgtctattatatcgatacgcttcaggagaccgtcacagatcagggcactacgccggaggcagtctacattgatattccggataatgagtgggatgattttgcagcgcagtttgccacgaaggtttataattcgaaatcagattatagaaatagaagtttgttgatcactggtgttgtagcgctgattggcggagcagtaacttattttgtcagtggccgcgcattgaaaccactcagagaattctcagaaacagtagaaaaggttcaggcgcagaatctgacagagtatacgattgaggaaaataaaatcgcagagttggaccgacttcgtacatcttataataagatgctcctgcgactttcggaatcattcgagacacagcgtcagtttacagggaatgcagcacatgaactccgaacccctttggcattaatgcaggcacagctggatctctatcatgcggcggagaattcagagaacgaagcagctgcacaagagacgatccagatggtaacagagcaaaatgaacgccttagcaagcttgtcagaacgcttttagatatgagtgagctgcagacggtagcacgtaatgaaaagattgaaatgcaggggctgatagaggaggtgctggcagatttggaaccgctggcgcaggaaaagaatattgaactgatacagaagacacagaattcatcggatggaagaacagatggaacagaagagtcgttgctggtcgcatgtagtgtgaacagtaacgaaaagccagaggatgaactgatattgacaggaagtgatattctgatctatcggatgatttataatctcgttgaaaatgcaattaaatataatcgggtagatggaaccgttacagtatcggcgaagagagagaagaatgaagttgtcctgacagttgcggatactgggaatggaattgatgagacatttcgagagcagatttttgaaccatttttccgggtagataagtcaagaagccgtgagcttggcggtgtgggacttggacttgcgttagtgcgtgaaattgtgcgggtgcatgatgggaagattgaggttcgcggaaatgagcagggcggaacgacatttgaagtgagaatggggatgggatggaatagaagaataaaataggtaattgcgaaacaagttcgcaatctcgataaaaaatgcggtaagaatcctgcatcgcaggattcttaagatgaaaagtaggtgtttctaaatttggacatgatcaaaagacttcccagataaactgcgaagaaaagatcgtatggatctgaaagcaacgagaagagtgactatcgcaggagtcctgatgaacataagcctattggatcacatcatcataggtgcggatggaagatagtgctgaatttatcatcactctgattcgtataagtaatattttggtcaccgtctaacatgaaaaaatatgccttttcatcatatcctttaaggtttaacattgaatctaatttcgcattgtcatacacagctccaatttcatactaaatacacactccgtttctaactcaagtccatccattgcctgttgaaatccaagcctaataccgtctaaaccaacgaataaatcattcgtggcatgagtaatcctcattcgttttggttccactaaactatgagatgggggagccccctttttcaaggaaactaattttgtgactatttcacaattgaaatgtaaacgttttcccgtatgataaatgtatagaattcttccggaggaattttaaatatggaaaatatagacattaaatttatcgcgaaaaaaagcgagtgttcgattgctacggtttctcgtgtgatcaatcgttccaaaccagtcagcgaggagttacagaaaagagtaatagatacgatcagaaagtacaattataatccaagcatttacgcgcagaatctggcgggtaaaaagtcaagactacttggttttataatgacaaactacatcaatcaatatcagctgctactgtttcgttatctgaatgagtttgcatgcaagatggggtatggttgtattattcgttattgtaattctggatttgaggaaaaactagaggtattaagagaactggaaatcaggggaatcgaagtctgctttagcctttttctgctttcgcaggaagaggaagcgtacataaaagaacatttcagaattaaagtctgccatatgcagtcaccggaaatgcgattgaacatcatagaaaaaaacgaaagttctgtttatgaggctgtgtgctatcttgctcagcttggtcacaaacgaattggaggcattttttgtattgacgaaatagatgatagtttcctcatggcaaggaaaagaggttttttaaaagctataagtcagataaatctcgatcaagatgaatctctgatcggccagcttcatggagaatgtgaaaaagacagtgtaatttctgtgatagaaaagatatttgtacctcaaaagccgccaacggcattgttttgttatagcgatgaagttgcgatcgaggtaatgtcctggatcatgaagcagggttatagaattccagaggatatatctgtgctttcatttgacggtattccgtttgcgggacgcgtaacgccatctttgtctacaattagccagccagtagaatatcaggcaaaatgtattataaacggcatgttgtatctacaggatggaatagaaagaccatgcgatgaaaagggaaatgaatatcttctgcagattcgggacagtgtgggggttcctagtcattaaaaagattggaggaaaaatatgaaagcgaaaaaattaattgctactggtattgcaacatcaatgttactgctggcgcttaccggatgcggagcaggtggaaatagtggtaaatccgcaaaagatacagataaaggatcagtatattttctgaactttaaatctgaactttcttctgaatgggaagaagtagccggaacctttactaaggaaaccggaattgatatgaaagtagttactgcgggaagcggaacctatgaacagacattaaaatctgagctttccaaaaaagaaatgccgacactttttaacgttaacggtccgattggatatcagacatggaaagactattgtgctgatctgaaagattcaaaactttatgaatggcttactgacaaagatatggcaattaccgatggcgatggtgtgtatggtattccgtatgcagtagaaggatatggaatcatctataatgatgctattatgaagaaatattttgcgcttccggataaagcagttgatatttcagatacaaaagagattaaaaatttcgacacgcttaaaacagtggtggaagatatgacaaaacataaagatgatcttggaattcagggagttttcggttcaacttcatttgctcccggcgaagattggcgttggcagactcatcttatgaatatccctgtgtactatgaatacgaggctgacggagtggataatctggatgagatcaaattcacatataataaaaactttaaaaatatttttgatctctatctgaataattcatgtacagaaccgtctatggttggatctaaaaatgtcgaggaatccatggcagaatttgcaactggaaatgtagctatgatccaaaacggaaactggggctgggcaatgatctatgacctggatggaaacgtggtaaaaaaggaagatattaagttccttccaatctatacaggagtagaaggcgaagaaaaacagggactttgtgtcggaacagaaaactatatctgtatcaacagtaaggtttctgaagctgaccagaaagcatctgagaagttcttggaatggctgtttaacagcgagagtggaaaagcttactgcaatggaatccttggaatgatcccgccattctccacctttggtgaggatgaaagacccgataatccgctcgtacaggatatgcttagttatatgaacgatgattctttatattctattccttgggacttttcaaccttcccgagccaggaatttaaaaaccagcttggaagctatctccttgaatatgcgcaaggaaatatgacatgggatgatgtagttaagcagacaactgattgctgggcatcagaaaaagctctgcttgcacaatagtagagtttataggctggcgttttccgaacggaaaatgccgcatgatacagtgaatgtagcagatttcgctgctttggaatgcaaagcagcggtaaaatccgttgctgtttgtgcaatgcgtgaaaagcaacaaaatttatggggcagagacaaaaatgtttctgccctatgtacgaaaagggaggctgtatagaagatggaaaaagcttttaaaaagagatttgtgatattaatgttaccaacgctgatcgcatttattattgcatttattattccatttgtactgggaatttatctttcattcactaaatttacaacagttacagatgcccagtggattgggctgagcaattatattgtggcattccgggataaagatttccttgcatctctcctgtttactgttaaatttgtacttgttaatcttgtgacgattaacttaattgcctttatgctggcatatgtgttgtccagaaagctccgtggaacaaatattttccgaacagttatatttatgccgaaccttctaggcggaattgtgcttggttatatctggcagctaattattaatggatttctttcttttttcaaaacaacgcttactgcagatgcggcatatggattctggggaatggtgcttgctatgaactggcagatgatcggatatatgatggttatttacattgcagctatccagaatatttcagaggaagtaaaagaagcagcacttattgatggtgtaacgcgaggacagatgattagaaagattattctgcctctgatcatgcctgcaattacaatctgcttatttatgacaacaacaaatgcatttaaaatgtttgacttaaaccttgctctgaccgcgggacttccgggaaaatcgacttctctggttgcactggatatctataattcattctacaacagaatgggttatgagggagtcggacaggccaaagcagtgatgtttttactgattgttgctacaatttcagtgacgcagcttattattactcggcgtaaggaggttgaaaactaatgaaaaataagaagagtaaaatcatactgatcttaattcttactgtaatctcggttttatttatcgctccgattgtgattgtatttatgaattcgtttaagagcaaactgtttattaacagtacgccgtttgcgtttcctaatgccgactcttttgtaggtttggcgaattatggagaaggaatgatcaagaccggatttttgcaggcattttttattactttatttataactgtagcctctgtgttttttattgttgtcctgacttcaatgacagcatggtatttggtacgtgtaaaaagtcgttttactaaagtaatgtactatctgtttgcttttgctatgatcgtaccattccagatggtaatgtttacgcttgttaaagtatcaaatatgtttcatttggacaatctgattggtatcatatttatttatgtcggatttggtgctggattgtctgtatttatgtttaccggtttcattaaatcaattccagtttctctggaagaggcagcgatgattgatggatgttctattatgcaaatttactttaaaattgtgtttcctgtgatacgcccgatcattatgacagtcgcaattctgaatgccatgtggatctggaacgattatctgcttccatatcttgtaattggttctgaatataaaacaatttctgtggcaatccaatatctcagaggtggatatggatcaattgaccttggacttatgatgtccatgctagtactggcaatcataccaattgtaattttctatatgatctgccagaaatggatcatacagggagtaatcgccggagcagtgaaaggataaggagactagaatgaaaaaagtattatatgaggaattacttccggaagaatgcgtgcagagaatacaggagatgccggttgcttatctcccgcttggcacattggaatggcatggtccacatatgcctcttggggctgacggaatccagtcaaaagagttgtttgtccgagtggcagaaaaagtaggcggcgtagtacttccgatgttgtttatgggacctgatcgtgtgttttatgacagggggactgcgttttatggaatggatattaataccgaaggcgcactgaatacatattgcgtccagcagatgaaaggcagtgcctattggatggaaaaaggtcagtttcaggacaatctgcgcagtatctttgcccaactgtccagagcaggtatacgtatcgtagtcggacatggacatggtccatcaacaaatgcatttcaggaactaaaggaagaagcagcagaaaaatatggcctgcgcattttgactgcttggacatttgcagatgatgatcggttgaaatatcagaatgaccatgccggagcgaatgaaacatctatcgtaatggctgtacgtccggagttggtagactttggacaggtgaaagaaaatgaaagtaatctgatcggaatcgcaggacgtcatccagtcagagaatcatccgtagcatacggaaatgaaatccttgagtatacaatgaaaacacttatttcaggtattgaaaaggagtacaaaatactcaaagaaagctagatgcaaatgagtttgaactgttttatgaaaaaagaatcctgctcgcaggattcttttttcagcatttgttgatttttttacaaattcaattttcttctcgtagcaaagctacgatatctgagtcattatccattgccgatttgtcggtaatttctgttttctccaattcttcaactgaaatttgagattcagtaatattgtctattattttcaaatgaaacacttcttttttctctgcagcctacacgtacattctattgtgtttgtcaacccttaaaaaatggttagaccacttattgaaaatctaaccatttaagatacgcaatgctaatcaaatgacattgggctctgaacagttacgcataaaaaaggctgcgcacctatagttcaatattattgtttcatcatccgattccgcccagtactgcgccggcaatcagtgcaataagtgcgagtggaacaaggacatattttccaagtagcaagaaccaagttccgatttttttctcacgtccagtatttacagctttcagtgcgaattctttatctgcgatccagaagaacatgatcgctgcaagcattgctccaagtgggcagatatagatagaaactgcgtccatccatccggagacgatgccctggatgagaagtgcgatacagcagccgaatgctgcaatgattccaacagctgagacacgctttaatccgaaacgttcctgtaatgtagcaaccggagcttcgtatagatttacaagtgaactcattccggcaaaaagtacgcagatgtagaaaatgatgcctacaatcttgccgccgggcattccgttgaatacattgaccagatagataaacatcagtcccgggccgccagaagataattcagcaccgccgactgccattcccggaatgatcacgaaagcagcgagtaaggcagcgattgtatcgaagatggcaacattttttgcagaacttaccaggtcttcagaatcctttaagtaggaaccataaataacagttccatttccggcaatggacagagagaagaatgcctgcccaaaagcatagatccaaagtcttgggtctaaaagtccctttggattgatcgtgaagatgtaacgatatccggtcgatgaaccaggaagggagaaaatatataccccgagtccaagaaacagtacgaacaataacggcatcattacgccgttggcacgctcaattccaccggcaatccccattgccatgatcacagcagttacaaggactgcaattacaagccaaaggttattaccaaaagcagaagcagtactgtcgaacatgcctccaatttgattcatatcttgtttcatgccggcaatctgtccggtcagtgcaaggaaggtatacttgaaaatccatccgacaacaactgtgtatccgattgcaagtgcaagggagccgagaaccggaagcagtccgatcaattcacctgttttcttattgccggttcgcatttctgtacagacaccgaaggctttgattggtccacctttggcggcgcgtccgagtgccatctcttcgatcactccggtagaagcaatcaatattacaaataaaatataaggaatcagaaaagtcataccaccccagtctgataccatgtaaggaaatcgccagatattccccataccgacggcagagccgatgcaggcaaggataaatcctgtccggcttttgaatccgtcacgttctttctcatgttttcccatgtgtagtcctcctgtaaaagtgcgtatacttttgtacacgaacgtattgatgtattatagcatatttacataaagaaaagaagcaccgagatgatgcttcttttggtgtgtgcgcctagcggtgcacattacgaatcatgcaatatgacagaaagaagagtccatccctttctcaagcaatccactttcagtaattgttttataaatagcatctgcaagtgctgcatgaccggattcatccagatgctcacggtcaatttcacttggaagagcaatttttgaagcgtccagaaaaccggcgtgataatgagtggcaactttccgatattcctgtgcaagctgtctggaaacctgttcagacgcaagatcgaattcaggatcaaagccgtcatctccgactccattgccaagatggatcggagagatgatcaagagttcaaagggctgagaactatagttctttgccttttcaataacctgaatcaatcctttggcaatcgttttggaagaagcgttaaagcgcgttttacagtcatttgttcctaacatgagaaccagaagatctataggattgtgagtctctattgtgattccaatctggtctaatccgcggcggccttcgcgaaaagcgtccgaaaaaatagttgtgcggccgcacaatccttcttcgataatgcgatgtccgttgccgaaattcttttgaagcaggcaggtccatcttgttttttcatcaaagcgtccggttccatccgggcggtatccgtaagtattcgaatctccaaagcataagatattcataagcaaattcctcactcaaacaaaataacatattaaacaagtatgaaaagtatgataaagcatttcaatgagaaagtcaatagaaaaacccaataaacatatgaaaatagtaggaaaatagaagacaataggggaatgctcgggttattggcatattcatgccaaaacacctcgcgggatagtggtgtgtgaacagtaactattgttcagtagtgagatgtcacaggcaggaagtaagcattgtttttgagaaaataattttgtataatgaagtgcaaagctggttacgataagatatagcagcaagaatgccgaggcattcttgaatatacgacttgggaagtgaaagacaaactatgaaatgtaaatggataaagaagttaacggcaggaattatatttcttgcggcagttggaagtctgagtggctgtcagaaagcagcgacagcagagaatctgttccgcgatattgaggttaatatgacatcagtagaatcggcagaagagaatcagatcgtaaaactgcagatgggggatggcgacagtgcgatcagccaggagagcaatctggatatcgagatgatacgggatccggcagcagtacacagaaaaggtcagcagaagacgaatatggccggaacgaaagagacacaggagatggaatcttatcaggtggaagaagacgggaagactgtgatctacagtggaacggatgaagcctgggagaagaacgctgttgaggagaaagagacatcttcacagcagactgtattgttcgatggacttcagaatctgtccggagcattcagcgtttcacaggatcttgcgaccgtgaataaggaagagtgctttgagctgacaggaatgatcagtggaacacagttccaggagacatttgcagatacgctgaaagctttactcggagaagattcctctgatctgtcaggctggaatctacaggcttccgaggatgaggaaaacaacgaggagcttcagcagaaattgaacaacataaaagtggactgtgtgattgatatttatagaagtaatatacttccggcaaagattacctttgatctgacagattatctgaaggcagcaggagaagagaatgcacaggtgacatcctatacactggaagtgacatttgtgtcctataatgatacaaagaagattaaagtgccaaaggctgtaaagaaatctgcgaaggataacggtgaggacgaagcggagaatagtacagatgaaatgctggaagaagagaatcaggaagcaacggcagaagcagaagccgctaagggaatccagtcggatatagaaggtgcttcaccacaaagcgaagaacttggagcaagctggaattcttataccgttcagattaacggtaaggtactgacacttccgtgtacgattgcagacctggaaagcactggacttacgctggatgaaaaaagccttccgcaggagtatgagattgaagcaggagattatcagaatgcctggtttaaagatgcttccaagaatacgatcatggtggatctgatcaatacagggaatgctgtaaaagaagcgaaggattgtctggtcggaggaatctatgtggaacagtattcactgagaaacgaagacctgacagtaatattcccgggaggaatccagttgggaacggcaattgatgtcgttcaggcatcatatggagaagcatcccaacatacagaatccgagcttgtaaatgtatataactggtatgaagacggaagtttttataatagttgcgagatcgatacgaacagcacggatggaacagtgagcatgatgggaatcagcaggttcgaagtgaaaaacggtgagtaactgttacattcttgaattgtgatgaaaaaataaaagaaaatttgtaaaaacacttgcattccacaaaaacatatggtattatataaaacggtcacgcaagaaagtgatcgttgaggccccgtggtcaagcggttaagacatcgccctttcacggcggtaacacgggttcgattcccgtcggggtcattttacagaaagcattgctggatgtaataaaatttaagatatggcgcagtagccaagcggtaaggcgtgggtctgcaacaccctgattcaccggttcaaatccggtctgcgcctcttagaaagtttggaaatgattgtttccggacttttttctttatgtgaaaataagtatttagatacaacaaaatcccccatgagaagaagtaaagattctgtcttcccatggggaattttacgtgcaatattatagggcttatcagttaataaacaaaacttatgaattcgcaagtgctgtctgttttacatctggaattgcaatcaaaatcggataaagtacagcagaaagcatcagtccaccgattccctggaccaggttcgccggaacgcttgcgaatgcaccggctccgtagataaagtactcgcacaggcagtaaccgccggcaacgagaatgatatcagcaacaccgccgaggatgactgctgtgtaacggcttttggaattcttacctactttacggtaaagaagggcggagcaaagggataccagtcctttgatcacgaatgtgatcggaacatagacaaaatatcctccgagcaggtctgccatagcagatccgataccgcctgcgaggaatccccatgcaggtccgagaacaacaccagcaaggataacaatcgcatcacccgggtgaatatatccgcttgttccgggagtaggaatcttgattgacatcgtagcaacacaggcaagcgctgcgaacagtgcagccatgacaagtttctttaatgttactgttgacttagaattcataacaaaaacctctttcctttaagatttatcatactatacaacagaagtggactataaaaaagagccacttttacaaaaataaaccataccagtttgagcgggagacaaatttataaaatcttaagaaatgtagagagtatgctttaagatgttgatgaaataataaaaaaggtttacactagaaatgtttgtatctgtatggtaactttatagatactttgaaagaaagtatagtttacaacatatgaaaaaggagaacttcaaagatgggatatcattcaattatatatatattcctatttcttccggtttgtctgttggcctatcagcttgcaccggagaaatggagaggaagagtcttgcttgcattcagctggattttcttttatctgctaagtggaaaattgctggtttatcttttggggacaacgcttctgacccattgtattggcatctggctgactttgctcaaaacagaagaagcaaaagccgtggaaggcatggatcggaaacaaaagaaagtaattaaagcagagtatcagaaaaagggaagaagagtattaatactgggaatcctgattttactcggagttcttggttatttaaaatattttgatttctttacgacaaacttgagttatttattcggacatccggttttggaaggatggagaccggaaaagctattaatgccaattggaatttcattttatacattgcaggcaattggttatatgacagatgtatactggggaaccatccaggcagagacagaaatctggagaaccgcattgtttcttggattcttcccacagatcatggagggaccaatcgcaagatattcagatgtggcagatactttgtatacaggaaagccattggaatatagaaatgtggtcgatggttatgtaagaatcttctggggactctttaaaaagatggtgatagcagaccgtatggcactgatggtaaatcaggtgtttgaccattatgcagactatcatggagcagtgattcttgcggcagcgatcggttatgtgattcagctttatatggaattctccggttgtatggatatcattataggaagtggaaagctgtttggtatctgccttccggaaaacttccgacagccgttctgtgcgaagaatccttcggaattctggcgcagatggcatattacactcggcgcgtggttcaaggcatatattttctatccggtatcggtatccggattggttaagaaatggaaccagtatggaagaaagcattgcggaaagcatattacaagactggtgacttctgcaatcgccctgttcccagtgtgggttgcgaacggagtctggcatggcgcacagtggaactatattttctatggaatgtattattttgtattgatcatgcttgggattgctgtggagccggttcgagaccatattttagaagcgtgtcatattgatccggagacgaaaatctggagaacaatccagattgcaaagacatgggtgattattgtagttggagagttatttttccgtgcaaatggattgaaggccggatggtatatgttctgtagtatgataaagaattttgatgtgggacaattaacggatgggacactgtatacacttggacttgagcgggcagattatctggcagtaattgtaggttgtctgatcgtgggagtgataggttctatgaaagagcgcggaatctctgtacagaagaaaatgggagaactggctgtaccggtgcgctggggattgtattatgccttagttatagggattttgatcttcgcagcgtatggggatggatatcagattcaggatctgatctatgccggtttctgaggtgagaagaatgagtaagataaaaagaggaattctctttattgtaatactggcagtatttttggtgacaagttctgtcgggatggaatattatgtggtgcatcagctgaatggagaagtgaccggaagaaaccgcccatttgcggctcttacagttgagccggaagatacattggatctgctggtggccggtgatagtgaaagctataattccgtgtctacaatgcggttgtgggaagataagggaattgcagcttatgactgtggacagggagcacagagaattccagaaacttattatatgttaaaacagggatttaaaggacagtctcctaaaatagttatgctcgagacaaataccttgttccgtgatatcggtgcagtgaaaagtacacaggcaattttagaacagatgggtcaatattatcttccggtgtttcgttatcataatctatggaagacagcggtggatgaaccgaaaatacatacgaattacaaggggtttgtgattcgagatgaggttgccccatatgaaggcaaaccggattatatgaagaaaaagaaaaaatgtgaaacaatgccaaagtatgttaaaatctatttggagaaaattgaagaactgtgtgagaagaataacgcgcagttattgcttgtcagtatgccgtcaccgaagaattggaatcataaacgtcatgcggagatgcagcaatacgcagatgaaaaaggaattgcatatcttgatttgaatgagaaggtagaagaactgggtttgaattgggcggaagatacacaggataaaggggatcacctgaatgtttatggggcagagaaggtgacttcatatcttgggaattatttagaagataattatgagttggaagatcatagaaatgatccggcttatgaagcatggaatcagctggcggaacagtacgagcaaaatcttgcaaagacacgaggagaaatagaagtgacaaaagaaacaggtgtagaaaaatgatagcaaaagagaagttgaatattttatggagtctggagcagacagcggaaaagtatgcagaccgggttgcggtttcggatgtgaatcaggagctgacctggaaggaacttgtgaagaaagctcaggtaataggcgcagaattaagtgaaaaagttcaaccggggaacccggttccggttcttttagagaaaagttcagaaacactggcagtgatgctcggcatcgtttatgcaggatgcttttatgtgccggtgaacccgatgaatccaacagaacgtctgagaaagattatggagaaactggatcctgaagtgattatttccgatgaaaaagggaaggaacagctggcagctgttggaaatggactggaaaataaagtgatggggccggaggcacttaagacagcaacaggaacggaattgtcagaagagcagtacagtagactggaacagatccaggggcagtggaaagagacggatgttttatacggaatctttacatccggatcaacaggaacaccgaaggcaatcgtggtaagtcatggagcagccagccggtttatccgtcattttacagaaatctttgagattacatcagcggatgtaattggaaatcaggcaccgtttgattttgatgtgtctgtgaaggatatttattccagtatcatgacaggggcacagcttgttttgataccgaaggaatatttttcaacaccgccgagacttctggattatctttgcgataagaaagtgactaatctgacctgggctgtttcggcattaacacttgtgtctgcgttgaaaggattgaattacagagtgccggaatcagtaaaaagggttatgttcagcggagaagcaatgccgccaaaacagctgcgtatctggcaggaaaaactgcctgaagcaaagtttgtaaacttatatggaccaacagagattacttgcaactgtacgtattttccgattgagcgacagtatgaggacagtgagaaaataccggccggtaaggcattcccgggaagaagagtaatccttgtagacgaggaaggcaaacaggtgacagaacctggtgtacagggggaaatctgctcggcaggagaatctctggcgaatggctattataaagaacctgagcagacagcggagaagtttgtgctgtatcctgtagatggaacagaacagagaatgtatcgaaccggagatcttggaagttatgacgaagaaggaaatatcgtatttgcaggaagaaaagatttccagatcaaacatatgggacaccggattgagctggaggaaattgagcgttctatgacagcacttgatggagtggagaagagctgctgtgtctttgatatggagaaaaatcgtattatgggattttatcttggagagaaagcagcctcagatgtcagaaaacagatgaaggaaaaacttccggtctatatggttccgacaaaattgattcaggtagatgagatgccgttgaacaaaaatggcaagacagaccgtaattattttaagaattatggaaaaaaatagaatgtgatgtcttaaaattaatcacaggaaaaagaataaggggaaaggataaatgttatgagagaagaactgcttcaagaggcgtttagaaagtatggaacgcccctttatgtgtttgatctggatatcttaaaagaacagacagaacgtattcgtgcgggatttggtccggagatcaacctttgttatgcaatgaaggcgaatccatttctgacaggatatatggctcagtggtcagaccgaatcgaggtctgctctatgggagaattccgaatctgcaggaaactgcaagttccaccggaaaagttgtttatttcaggtgttatgaaaaaacgagatgatattcgggagatacttgcatattgtggaaatagatgtgcatatacggttgaatccccgctgcatttccaatattttgtggaatggagcgaggaacatccggaggatggtattctcagattgtatccgcgacttacaagtggaaatcagttcggaatggacgaagatacggtattagaaattctgaaaaaggcaaaggaacttccgggaatcgaggctgagggaatccattatttctcaggaacacagaagaagaatctgaagcgtcatcagaaagaactgacatatctggatgaatttttaaagaaggcagcagaagaacagattgatgtgaaatgtcttgaatatggctctggaacggcagttccgtatttccgcgataaaacggcagagacctttgaagaagctggtctaaaggggcttcaggacgctgtgaaggctatgcagtggaaggggcatgtaacagtagagctggggcgtgcgctggctgcaatgtgtggctattatttgaccaaagtggaagatacaaagacaagtgatggaattcattattgcattgttgatggaggctgtcatcagattaattacgacggacagattaagggaatgtatgagccatatgtgaaggtacttccgaaagaagtttcaatgaaggatgcggaagactctgaggacaagaatacagaggataagacatggaaagtctgtggatccttatgtacattgaatgatgttctatgcaatgaaattaccttgagaggtttggaaaaaggcagtatccttgtgtttgagagaaccggtgcatattcagcgatggaaggaatggcattattcttgagtcatgaacttccgggagttgtactttacagtgaggaagaaggatggatccaggcaagagtacagcaggaaacttatgaattgaacatggtagaacagttgtcataaaaagatatttgtgatataacgtaggatataatgaaattcaaaataatagaaaaagaggaagaaaaaatggaagaattattagagattttaaatgagattgatgatagtattgactatgagaacgagacagctctgatcgatgatcagcttcttgattctttcgcgatcatcacacttgtatcagagctggaggatgcatttgatatcagcattgaagcctctgagatgatgccggtgaacttcaattcagcaaaggcgatctgggcaatggtacagagacttcaggaagattaagatttcaaaagtctgtcaatgatccgggaggcttcgcttcttgtcagcgtagctgtatcccagtcaggtatcagttctttctgttccgtcagacgttctaagagtgcaatctgctttggtgtggcaggctgcacttttttaattttatattgaagttgaagaggctggaacactttcggatcctgtggctcaaaatagtgtgccagtgtctgataaagctttgcggttgcgagtgcatcatagtatgcgcggtgagcagcaggattctcaatatgataatagtcgcataatgcaccgagacttttagactcaaagtctttatgtactttgcgggcaatttttaaagtatcgatccccattttttcaaatgtaagcccctctctgacagcactgcattttacaaagctatagtcaaacatgacgttatgtccgatcagcacatcatcttcacaaaaggagagaaaatcgtggatgacttccgggcaggatcttgctcctgcaaccatatcatttgtgatatgcgtgatgttggtgatcatcggtgtgatcggtttgtctggatggacgaattccataaaacggtcaacgacctttccttcccggactttgagggcaccaatctctataatttcatgttcctgaggacttagcccggttgtctccaggtcaaatgcaatatatgatttcagcatagaatgctccttatctgtaatgttaataacttaatatcactatactaacattacagataagagaaagcaaattttataaaaatgattctaattctcgtatcatttcttcttctgttttgataatttttcttgccagcgcatcggcagatttgtcagccctgttcaatgtattggcacgttctccgagtgttttaattcccatgctgcatccatcaatcagaagttttgcaattttggagttatcatcattcagattcagtttaagttctgtgctgaaccaggaaaatgcggaagccatcattcccggagttttaacttcatttcccgaatcaatcaggtggtcttttgcattaccgcctaatcgagaatgacgatcaatgtatttttcaattaattggaataaggttgtatcttgggtgaaatctttgatttgctgcatactttcgattgccatctgacatcctgtgttgcattcttcatatagttttcgtgtttgttcatccatgatgaaatcctcctttttatggtgcgttatttgttacgaaataatatcaaagatggaatacgtgcatcagttataagaaaagaatgtgggtttctttatatagaatgtggataaaatacaaaattatacggtattttgtgaaaaacataacggtaaaggacttttctaagaatatttgttgtgctaaactaaaaaagagtttaacagaaaggaaaaatgtactcatgttaaagggaaaaactgtacttcttggagtgacaggaagtattgcagcatataaaattgcgtcacttgcaagtgcgctgaagaaattgcatgcagatgtgcatgtgcttatgacagaaaatgcgacaaattttattaatccgatcacatttgagacactgacaggaaataagtgtcttgtagatacatttgaccggaattttcaatatagtgtagaacacgtatcattagcgaagaaagcggacgtagttatgttggcaccggcaagtgcgaatgtgattgggaagattgctcatggcattgcggatgacatgctgacaacaacaatcatggcgtgcaaatgtaagaagatcgttgctcctgcaatgaatacgaatatgtttgagaatccaatcgttcaggataacctgaaggtactggagcattataattatgaagtgatcagtccggcggttggttatcttgcctgtggagatacaggagcagggaaaatgccggaaccggagcttttgcttgaatatattttgcgggaaatcgcaagagaaaaggatatgaaaggactgcatgttctggttacagcaggtcctacacaggagtccgttgatcctgtacgctatattacgaatcattctaccggaaagatggggtatgcgattgcaaaggtatgtatgcagcgtggagcggatgttacacttgtcacaggaccgacctctattgagaagccacattttgtaaatgttgttccaatcacaacggcgagagaaatgtttgaagaagtgacaggacgggccgaagaacaggatattattattaaggcagcagcagttgcggattatagaccacgctatgtcagtgatgaaaaggtgaagaaaaaggatgacgatctggcacttgaaatggaacgcacagatgatattcttgcgtatcttggagcgcataaaacaaaagatcaattcctctgtggattttctatggaaacagaaaatatgctcgagaattccagaaagaagctgaagaaaaagaacctggacatgatcatagcaaacagtttgaaaatggaaggcgccgggtttggcgggaatacgaatgtggtcacagtgatcacagaagattttgaaaaagagctcggcaagctgacaaaagaggaaacagcagatcgaatccttgatcagattctggcacagagaggggaagtttaaaagatgatactgacaatagacattggaaatacaaatattgtattgggctgtattgatggagataaaactctttttgtagaacgtttgtcaactgttcgtacgaagacagagttagagtatgcaatcgatattaagaatgtacttgatatttatcatattcatagagatgaaatcgaaggcggaatcatttcttctgtcgtgccgcagattacaaccatcgtgaagctggcggtagagaagatcctgaagaagaatgttcttgttgtgggagccggaattaagacaggattgaacattcgaatcgataacccagcacagttgggaagtgatctggtggtcgattctgttgcagcaattgttgagtatccggctccacttctaatctttgatcttgggacagcaaatacagtctgtgtgattgataaaaataagaattatatcggaggcatgatttatcctggaatcggagtttctctggattctctgacagctcatgcatctcagcttggcggaatcagtattgaagcaccggagcatatgattggaaagaatactacagagtgtatgaagagcggtctgatctacagtagcgctgccgcaatggatggaattattgatcgtctgcaggagcagcttggcggagaggcaactgtgatcgcgacaggcggactggcgaagaagattgttcctcattgtagaagagagattatcctggacgatgatctgcttctgaaaggacttgcaattatttacaaaaagaaccgtaagtaaaagatgacgcaaataaaaatgtaaatcaaatttgagtataaactgaaaaaccggaaagtaaaagaatttaaatttatcttttactttccggtttttatgtatatgtattaacgacacatatttatgggaaaattattttcctataagattctgtaaaaaatgattttaaacttacagtttgtcaccacgcttgatatatcccggtttatcaggagatgcgataatacgttttccacggattaaacgagcatgtttgtcgattacgagattctcagcgtgaacgccttttccgataacaacgtctgcaccgacgacacaattcttaagaacggcaccttctttgattgtacatccacgtccgataacacagttctcaacagttccttcgatcagacatccgttggaaacaacagaggatgtaaccttgctgccttcgaaatactgtgtcgggcaagagtcatttgtacgtgtataaatcggccagttatcatggaacagatctgttgctttcttcagatcgatcagatccaggtttgcctcataatagctgttgaagtctgaaatcgttgcgaagtatccgcggtgggaatatgcacgaacatcaagttcttcacaagattcgtttacaatatcagccagtgtgtacatagaggaaagcttgtgtgctttctgaatcaggtcaaggaacaagtctttcttcattacataagtatccatgaagatatttctgttctttgcatttccaaggtttggctccatggagagaacacccttctgtttgttgatgttcagtgtctgacagttcgggaaatgatccttcgcattgtcaacagaatgatacatcagagtgatgtcagcaccggagtcaatgtgtgttttgaggaaagcactgtaatcagctgtgtaaaccatgtagctaggcgcgattacaacatactcagagttgatctcatcaaagcagtcaaggttttccatgtaagctgcaatatctgtgttgtaaataccgttatcaatgttgctctcctgaaagagagtagccagtttaccacgtttggagttgatattgtaatggcgtcctgttccgatgtgttctacgagagaacgaggttttctacgaacataaacctgcattacatcaattccactgttactcatattagaaatcgggaagtcgattacacgatatcttccaaggaaagagaaggctccgattggacggtatgcctgcatgtcatttacctgtacgttggttcctgcgaagttgataattccaaaagctttactcatcttattcgtccccctttactcgttttgcaacgagctcaatattttcgctggcagcgtctccgacaacagcgttctttccaatcttaatgccatcggcaacaatggcgcgtgtaacaacggcaccttctgcaacctcagcacccggcatgaggacactatcaatgacttttgcaccggcggcaactttcgcaccagtgaacagtacagaattcttaacttccccatcaattacacatccctgtgtgatgaaggctctttctacaactgcatcagctccgacatattgtggaagtgctgttgcatcttctgtataaatcttccagcttgggtcattcagatcaagcttattgttcttatcaagaaggtccatattagcttcccaaagggaatcaattgttccaacatctttccaatatcctttgaacttgtatgcatataggctcttgccgtcgttcagcatagtaggaatgatatctttaccaaaatcatggctggaatctgcgttcttcatatctgcaagaagcatcttgcgaagaagtttccagttgaagatataaatacccatggaagcgaggttgctctttggatgttcaggcttttcttcaaattcaacgatatgtcctgtttcatctgtattcataataccaaaacggcttgcttccttcataggaacttcgataacggcaatcgttgcatctgcattgttctgcttgtgatattcaagcatcttgtcataattcatcttatagatgtggtctccagagaggatcagcagatagtctggggaatatgtatctataaagtcaatattctgggaaatagcatcagcggttcctctgtatacatcaaggttcgcatcagctttctcacgtggtgggagtacataaactccactgtccttcgcatcaagtccccatcttcttccagctgcagcatagctgttcagaagtacggattcgtactgtgtcagaacacctacaacgtcaattccgctgtttgcgcagttactaagtgggaaatcaataatgcggtattttccgccatatgaaacggctggtttagccactttttttgtcaaatcatggaggcgggtgctgctcgacctccggctaagatcatagccaacatattatcgtgtttcataaaaagccctctctttcataatactacttctttagtatactcttttttgtgcgatattgccaggattttgtatagaaaaaataaaaaaatagcaaaaataatggaaaaatttatcgaaaatcatttgtcatttttcacaaaaaaagaaaattaggggaatcagacagatttttaggcattattatatacaagtgaaaaggaacattaaaaaaatttccttaatatagaaagaattgattgatttcaaagcaggagtgtggcaaaatacaaatcacagtattcatgaaaatggcaggtgtgagatgaaagcaaatgtgaaatcagttttaatgaaaaaatattgcagagtatatcaggcgggggcgaagcttttgatggctgcacttccgtggcgttcaccgaaaatgctcagtggatcaggagcagtgaagaagctgccagaggcggttcgagatagaggatttcataaagtattaattgtaacaggaccgaagatccgtgcgagggggcttcttaatgaactgctggaagagatgaaagagaagaagttgaaatatgttatctttgacggcatttctcagaatcctacggatgaagaagttgaaaatggagtaggaatatttcttggagaaaagtgtgactgcatgatcgcatttggtggcggaagtgtgatggattgtgcaaaagggatcggagccagagttgcgagaccgaagaaagcaattcggaacttacagggacttttccgtgtgctacgtccgattcctgtaatcttcgccgtgcctacaacttcaggcagcgggtctgaggcaacgattgcagcggtgattaccgaggttcagacacatcataaagcatcaatcaatgatttgcaattgatgccacgctttgcagtacttgatccgtgccttacagtaggactgccaccacaggtaacagcacagacaggaatggatgcgctgtgtcatgcagtggaagcatacacgaatgatacatataacagtgattttgagcgtctgatgtgtagtaaggcagtgcgattgattcatgaaagtcttctgacagcatatgaagacgggacaaatctgcaagcgagacaggatatgcaggaggctgcatttcatgcgggacgcgcatttacaagaggaagtgtgggttatgttcatgcaattggccatgcgatcagcgggctctatggagtgcctcacgggcttgtgatggcaattctgcttccgcatgtgatgcgtgcctatggctcttctgtgtatgataagcttgcggatttgtgtgatatctgtgcgatggaagtagatacaccggacggtatgatctcagccgaagttcgtgccgaaacatttctccagtggatggaagagttaaaagagaaacttggaattccgaaatatccggatatgatccgggaagaagacgtgaaccagattgtaaaatgggcacagaaagaggcgaatccggtttatccggttccggagatctgggatgcgcaggagatgaaagagtttgttctggccatgatggaaggtgcgagacttgaaggtgcagaaaagaatgaataaccgacaaaaatcggtgagggatgtaatgaattggaggaaataatgacagtatgagtgacaatgcaacaatgaaaaacacaacgattcatgacatgacgaccggaagtccggcccgcctgatcatgcagtttatgataccaatgtttttgggaaatatatttcagcagttttacaacattgctgattcaatcatagcaggacagtttcttggtgtaagagcactggctgcaattggaagtacgggatccttgatgttctttgtgacaggctggctgaatggtctgagtagtggatttgctattttggtgtcacagtggtttggcgcgaaagaatatgagaggatgcggcattatgtggcgatgtctatttacctttctgctggttgggctgtgcttatgacgattggtcttggaattgcaaatgagccaatcttacgtttgatgaattataaggatagcattatgccggacgtaaaggcatatatgggaattatttatgcgggtctgattgtaacggcagcgtataatgcgctggctgcatttctacgtgcactgggtgattcgaaatccccattgtattttttgattatttcagcagtaatcaatgtaggacttgatgtggcgttcattatttatggcggcatgggtgtagaaggatgtgcctatgcgaccgttatcgcacagggaatctcagcagtactctgctttatatatatcgtgaagaagttccctattctgcatcttaaaaaagagaatttcagattttctcttccagcttgcggaaaattgatggctcttggagttccgatggcattacagttttctattacagcgatcggaacaattattgtacagggtgctgtaaatgtttacggggaagattatatggctggtttctctgcggcagcaaagattcagaatgtaatctgcacagtattcgttgctttcggtgcaacgattgcaacttatgtgggacagaactggggagctggaaaagtagaccgtgtacgacaaggtgtgcgctgtacacagattatgattctggcttacagtgtaattgcgatgatactggtatttttctttagtaaatatctgacctacctttttatcagcccatcagagacgaaagttattgaagtatctgtgctgtatttccatacggtgttctggtgttatccattcctgggaagtatcttcctatataggaataccctgcaaggacttggatatggacttgtgccgatgctcggaggagtgtttgaacttgcggcgagatctgcaattgtagttcttgtggcaggaaaaacaagttttgcaggagtgtgtctgtcagacccggcagcatggatctccgcattgattccactgatcccgtattatatctatgtgacacggaagtggaagaaacaaggaaagatagtgatgtaaaagttcacaaagatgaatgcaaaataataaatggcgaagagagcggagcagtaaaagttctggctctcttcgtcattttccaggtgttcttcaaaaagggggataactggtgcgcattattgtagatattgtaggtacaataagagatattcacatttttataaacaaaaaagttgagttatgaacaataaacacattgaaaattaagtagagccaatgtattctagaactacttcaatctatggagtatctgaattcagaataaaaaacaatcaattgcttatttcaaagcaccgattcaaaaaataaaaagaaaaacaaaaaggaaaaaagtgaggatgtgcctatgaagaataaattacaaaattattttccgatgatacgtacgcaaggagaggtattgagtgaacttcgtgaaaatacgaagctatggaaaacattttgtgaatgggaagggaaatatcaacaggaatatcttgacatttgtacaggtgtaaaaggagtaaaattattgtatgacacttattttaaagcagttatgaatccggacacaagacctgaacgattaaacgattttctatcagaaattcttggggaaaaagtaaaaatattaaaagtattgccaaatgaatctgcacaaattgcagcggaaagttcattgctgatcatggatattgttgttcagtttgaagatggaagtatagcgaatgttgaggttcaaaaaattgggtatttatttcctggacaaagaagcgcatgctattcgtcagatttattattacgacagtataagagagtcagagcagagctcggacaaggattcacatatagaaaaatccaaaaagtatataccattgttttgtttgaaaagagtaattcggatttttctaagttttcaaaggaaatatatattcaccattttgagcagaagagtgatacaggagtggaaatgaatttactgcaggaatatacgtttatttgccttgacatttttggtgacatcattcaaaatgaagacagaaaaatagagaacagactggaagaatggctcgtatttcttagtcaggatgatccggatatgattattaagttattgaatcagaatgcagattttcaggagatttatgaggaagtctataccatctgtctgaatatggaaaggatgatggagatgttttcaaaagaactggcaatattagaccgaaatacagtaaaattaatgattgatgagatggaagaagaggttgtagaagcaaaaagaaaagcggacgaagcagtgagaaaagcggacgaagcagaaagccgagcaaaacaggcagaacatcgagaaaagcaggcaagagaagaagtagataacttgaaaaaagaattggaaaaaatgaaaaatatttaaaaatgtaggcaaaaaaacaggcgcagggaatcaattatgaagctctgcgcctgtcgtttgttaagttaaaattattctgcggcttcttcttcctcttcatctgaagtaagatcagaagcttttacgtgtacttctgtgatagtaactactgttgcatcaagatctgtcataagatcaacatctttgtctttggcaattggaagatcagcaacacgaattgtgtccccgattttcagaggtccaacatcaacttcgactttctctaccaatgcggcaggaagagccttgaaggaaatctcctgaagcatctgctgtggtactcctgaagacagtttctcgaggtttacaaggtgaatctctgctacagagtgaactttctcattgcttaccagtgcctgaaaatctatttcatctacataacctttcaaaggattgtaatcaacttccttgatcagagcgtcataagtctcgccggcaacttccagcataacctgaccacctttgctctcgactttcagaagtttttctatttctgctttatcaaatttcagtggaatagaatcttccagttcacgaccgaacaggtttcctgttacgaatccttcgcgtcttaatttttttgctttgattgacatgtctcttttttcagcttttaaagtattcatttatcttttcctccaaattactgaattcgcttagcagccttcaacttgtcaaaataataagtaggttttgttaagtgttatttttctttgctacagttacactatagcacccggtgtcaaggggaagggaaaagcagggagaattgtagggtgaaaaattaaggttttaaaggttgaaaaaggtgtgataaatgaaaaaattaaggttgtataacgggaatattcagagaattattgtgaaaatggcggaaatgtatgggacaggatatttatttagaagaaaagtgacgaaattaaaaaggaatcaaaacatgtgtaacattattgaaaatgtaaatcctttatgataaaatttcaaacagaaactactgatattagtcgaaatatcggtatagaaatggggaagaaacaatatggatttacagacattgatcgttttgatcatcgagttgatcggaacaatcgcattttcaatttcgggggcaatggtcggtattcgccgaaagatggatatttttggcgtgctggtgcttggagtggtgaccgcggtaggaggcggaatgatgcgtgatgtgatcttggggaagacaccgagcgcatttgtgaaaccgatttatgtagaagtggcagtgatttctgcattagcgccatttctcttactttctattaataagagactgatgcatagtaaataccagacactctatgcgggactaatgttcctaatggattcggtcggacttggtatctttacagcagtcggagtatccacaggatggacagcaggatatcatgataatatgtttttcttaagtttccttggagtactgacaggagttggaggaggacttctccgagatgtgatggcaggagttccaccgtatatctttgtaaagcatgtgtatgcctgtgcgtcaattgcgggggcaatctgctgtgtactggcatatagaagctggggacagattccggcgcttgtgatcggaacagtagttgtgcttgtgattcgtatcggagcagcgcactacagatggaacctgccgtgcgtgaagctggaggatgaagaataacgaataggaaaattcaatttggtgacaagacactgatagaagtagttgcatagtgcaaacacttataaacacccgttattttatcttgagaaggatgaaaatagcgggtgtttttatagtcttatttataaaaacagttcattttcttttcgtccggaacaagctttttttaacttctgggaagcagcagccagcattagtggattcagcttgcgggaatgcgttggacagacgctgatacagcgcatacaggaaatacatttgtccttatcagtctgcttaggattgtcagatggaattgctcctgacgggcatttcgctgcgcacaatccacaggaaccacaggtatgtgaagcaccagggataagcggaatcgtaccgtatttgcggtaaggtctgttgcccggaacatgtaccggcaagtggtcagattttatggaattattatctttttccttgattttccgtacaaagtcagagagcactgtaagatcattctgatcaggccttccggttgcaaactgatgcatgatggaatgttctgcgatagccgcaatagctgcctggcaggtgaagttcttttcaatcagagtatcttcaagttcgatcaatgtatcttcataagcacggtttccgtaaacggtgattagaatcgcagttgcattatttccgctcagggctttgattctctctaatgcaatggcaggaacacgtccaccgaaggaaggaactccgataatacagagatcttcttcggaaaaattatttgttagaccagaagtcttttcgcataaatcaatgctctgatattcgccaaattgttcagctataaatgtaactattttttcagttccactggttggactgaagtaaattgcgtatatactcataaatattctcccctaattaaatgttttagcagacacaataattttagagggtttggagatgttttgcaagagcctggttgatattaaaagataaaagtgatatgatttgaatagataaaatattatctaaaaacgcataaaatggtttgaaatagataaaatattatccgtagagcgaggtgggtgaatgcaacagttagtatgggaaacagcagaagaactggatcaaaagcttgcgcaaagagtgcgtaatattagaaagggacgttcgatttcacaggaaaaattagcatctatgagtggtgtgagttatggttcgattaaaaggtttgagacgacaggaatgatttcattactttcattgacgaagattgcgatggcattggatatggcagatgaacttagagatatttttacaagtgtgccgtatagggatatccaagaagttataaatgagacgaggtctcaaagcaaaagaagagatagatttagatgagagtttatggaattatattaaagagagtaggagtttattatgagttacatcacaacatacacgggaaatcattttgatccgatcaatccagatccggaactgatcaacattgtagatattgcccatgcacttccgatgatctgccgggggaacggccaggtcagtacgttctggtctgtgggagagcattgtattctgtgtgcgaaggaagccgctgccagaggatacagcaatcgtgtgatcgagggtgcacttttgcatgatgcaagtgagtgttatatgtcagacgtgccgcgtccgctgaagcaatttatgacagtatataaagagcaggagaatcatttgcttgatgttttgtataccaagttcctgggttcaccacttgatgagcaggaagagaagctgatcaaagagattgatgatgcggtattgtggtatgatatgaaatatttactgggtgaagactcagaaggagacaagccagaaacgtgtatggtacctgattatacggtgagagcattcaaggatgttgagcaggagtacttggaaatatttgaaaaatataaggtcttataaatatcaaaatgatgaaaaaggacagagagttctgattgaaaaaatgtcagaaatctctgttctttttgtaagtatcagtatagttcgcaactttgtattctgcggattgtttatctcagtcgagaagactcccacttcttcaggtggtgagtaatagaaaatggatgaaaaaacgtaagaagtgttaaggttttaaatggctccggtaatctgttggcgaaacattataaaactttttaaatgtacgtgaaaatgccagctggtcttcaaatccaagtgaattggaaataatcgaaacaggaagttgtgtagttgcaagtaaccttgcagcttttttgaatttcagttgaagcagatattttttgggtgagattccaaacttttcatggaaagcccgtgtaaggtaattctgatggatgccgaaatagtcagctacatcttttaacttcaaattctcagcataattgatgtcaaagtaaaatttaatttcatcgataattgacagtttatttgtgtctgcttcatgaaaatcaacatcggaaaaaagcatggaaataatatgaagcaggatactatttccttcaaaataatgactggtcaatgaggcgtctaattgcatgatcctggaaatagaatcgtaatattttcgggtatccagaccatggatcacataaatatcttctgttgaagtcataatctgatagagatagctttccgagctgatgccgataaagctgatccatgcataagaccaagggtttgtttttgaggcttcataataagtgatcttacctgccggaatgagaaatgcatctcctgcttttaggtgaaacacatgctcattaatacgaaattctccctccccgttgagtacaaaatgaattagctgatatgatctcaaagtcggaccataactgtagccaggtgtacattcttcataaccggcactgtacagagaaagatcactattggctttatataccagagaatgtttggtttctttatattcaatcataagtctatcataatacaaaaagttagttttttccatatattcttctgaaaatgctatgttccaaaatagaaaaatatagtttaatatagtcaggcgccagaaagtaaggacgggaggtcatttagaaatgataaaacggcagaaatatcatctggaaccggacagaggtctgctaaatgatcctaatgggttagttttttacaaggatatgtatcatgtgttctttcagtggaatcgatttgaaaagaatcattcttacaaggaatggggacattttacatcgaaagatttacttcattggaattgggaaggaagtgctcttttgccggaccagttttatgagcaaaatggagtttactcaggtagtgcattgataaaggatggtcagcttcgcttattttatacaggaaataataagagcggcggtgtgagaaaaagcagccagtgccttgcagttactgaggatggcaagacatttcagaaaaaaggcattgtggtatcaacacctacggagtttaccgagcacttcagagatccgaaagtatggcaggacggcgatgactattatatggtgatcggagcacagatgaaaaatggaagaggttctgtcgcactatgtagctccaaggatgcggaaaattggaaattcgaattagtgcttgcaaaatccaaggagtatgaaatggtcgaatgtccggattattttcaggtagatggacaaggaattttgctttattgtccgcagcacagagataatgaaagagatagttcactttgtagtttttcggcttataaagagtttgattttaatgacatagtttcaggaaaaatagaagatagcaatgtacagaatctggatgaagggcgtaaaaagatggatcagggatttgatttttatgcgccgcagacatttacatcaccggatggaagaaaaattctgtttgcgtggatgtcaagaatggaagaggaagaagagaagctgtttggtgaaggagaatccagtatccattgtatgacgttaccaagagagctttcttatcgaaatggagaactgtgtcagcttccggtaagagaattggaaaaaagtttgtgcatacataagatttctgagcaggaaagacaaagtggagaaataattcttaagaacagagtatactgtgcaaaactatctaatcttcagaatgaaacttcttttaaaatagaatttcagaacagagaagttattctagaatacaaaaaagtagaaaaaataatttctgtaaagagaaaaaattgggttacaaaagattatgatgagagaacctgtaagattgattcgttggaaacgatagaatgttggtctgatatttccagtatggaaatttttgtgaatcagggaagcaaagtgttttctatgagaatgttcacggaagaagaaaatggaaaagtaaaaataagcggactcatgaaagaaacagtcgtggaaatgtatgatttaatgggagaaggagaggagaaaaatgagtgataaagaattagcaaaaaagattcttgaactggttggcggtacggaaaatgttgtgtcagtaagacattgtgcgacaagacttcgtattgtagtagctgataaagaaaagattcaggtaaaagaggttgaaaatctggagaaggtaaaaggaagcttttttaattccggacagtatcagatcattctcggaacaggtctggttaaccgaatctatgatgaagttgtaaaagttacaggaacaggcgacgaagaaaagtcagaggaaaaagaaaaggtagtttatggaaataaatttcagagagcaatcagaatgttttctgatgtatttgtgccaattatcccggtgcttgtagctactggtttgtttatgggacttagagggcttctgactcaggaggcagtacttgcagtatttggtctgacagctgatagtattccgcagaatcttcttacatttacacaggtattgacagacacggcatttgcatttcttccggctttagtgtgctggtcaaccttccggaattttggcggaagtccggtaattggaattgtattaggattgatgcttgtaaacagcagcctgccaagcgcttatgcagttggatcaggagaggcacagccgttgattttctttggatttttaaaagtaacaggatatcagggatcagtattaccggcatttgtgacaggaattgtcgcttccaagtttgaaaaatggctgcgaaagaaagttccggatgcaatcgatctgattgtgacaccgttcttaacattgttggttggatgtgttctggcattgttcgtacttggaccaatcttacatacagtagagtcaggagttctgtttgcagtagaacatcttcttttccttccgatgggaataggcggatttttatatggatgtttcggacagcttcttggtatttttggtattcatcatattctgaacttcttagagatcagtatgttggcacaagatggatggaattatctgaatccaatcggaacttgcggaaatgttgctcaggcaggagcagttcttgcggttgcaatcaaagcagtgtctaataagacaaagcaggtggcatatccggcatgtctgtctgcattacttggaattacagagccggcggtatttggagttaacttaaaatttatgaaaccgtttgtaatgtcaatgatcggtggtggtgttggaggatttctggcatcaatcttccatctaagagcaacaggaatgtcaattacaggtatcccaggaacattgctgtatcttaacgagcagctgccactctatattctggtaaatgtagttgctttcggtgtggcattcgggctgacatggatgtttgggtttaataagaaaatggagcagtaagtatgagtattctatttcataacaaaggacagatcgtgcaattaagtaatgatacaataagttatgtgatggaaattgtggatggaaagtatccggttcatcggtatttcggacgaaagatccgaaattaccgagggaccggaaatcccctttattttaaaagggggtataatacggaacatgacagcagtgtagaaaacgtatcatttgatgatttcccatttgaatatccggtcggaggacatggagattttcgtattccggcttttgcaatcacacaagaagatggaataacattttgcaaaccggtgtttaaaagctggagtgtggtatccggtaagcctaaattacagggtatgccacagattcgtgttaatgaaaatgagtcagagacactggaagtgatctgtgaagatgacagagcagggatccgactttttctttattatacgatttttgaaaatcacggaattgttttacggcatcaaaaagtagaaaattatgggaagcagaccgtttttcttcagaacattcagagtatgtctctggaacttccggcagaagagtatgaactcatgacattatatggaacacatgctaaagaggcaaatatgcagcgtttcccgattcattatggggtgcagaaaacggagagtgtcaggggaagcagcagtcctcagcatcagccattttttgcggcgttaaaaccggagacgaatgaatgcagcggagatgtctgggcagcgcatcttgtttatagcggaaatttcctcgcacaggtggaaaaagaccagtttggaaatgtacgggcacagattggaattcatccggacagctttaaatgggaattaaaaccaggagatacatttgcttctccggaagcggtattgaattatagcaatacgggtctgaatggaatgcgccacaattttcattggctgtaccaacagcatctaattcctaaacgatttgaggaaaagacacgaccggttcttttaaactcctgggaatctatgtactatgatgtaacaatggagaagattgatgaacaggcagacctggctaaagctgcgggaattgaattatttgtgttggatgacggttggttccgtaaaggaaatgacagcagatcttcaatgggagactggatatgcaatgaacagaaacttccgggtggaattgcagcagttgcagatgtgattcataaaaaaggtttacagtttggactttggtttgaaccggaggcagtcagcgaggatagtgagttgttacgtcaacatccggactgggcgcttcacattctggggtatcaatcggtaaaaggaagacatgaatatttgctggacctttcaagagaagatgtccgtgaatatttatttaaaacattagatttttatttgagagatggaaaaatcaattacataaagtgggatatgaaccgacctctgacagatgtgaattctgcatgtctgggagtacagcaaaaagaggagatcagtcatcggtatgtgattggattatatgatattttggaacgcattacagaaaaatatccggatgttctgattgaaggatgttccagtggtggtgcgcgatttgatccgggaatgttgtattatgtgccgcagaattggacaagtgacaatacagatgcatttgaccgtgcgacgatccaaagagggtatagccttttatatccgcagataacaatgggggctcacgtaagtattgttccgaatcatcaaaccggaagaagtacttctctggatgcaagatatcaggtagcaagattatttaatctgggatatgaacttgatcttacgaaatgttccaaagaagaaagaaaagaaattgctgatcagattcaggaatataaagaacagagaggctggctgcaaaagggagtgcttagttatcttgaagttccgaatgagaattatattgcatggtcggttgtttctgcgacgggagaagaatgcgaagttattatcatgcagaaactgtttgatccgagatattctcatggaagaattcatctctgtggtctgcatccggaatgggattacaaagatgaaagtaccgggcagattttcggtggagatgaactgatggagatcggagtatcgctaccattaataaaacgagatttccatacatttgcatttcatttttcaaaggtaaaggagaattacggtgatcagattaattgcaagtgatctggatgggacacttctaaatgaggaaagcatgttatcagagaaaacagcggagtgtataaggactgcacagcagacaggaattctgtgggttgcggcaacaggccgttcgctgaaaacggcatctgagcttatgagaacagcgggagtgtcaccggaatatcttctgctaaatggagccgaattccgaaagagtgatgggactttgattttccaaaaatcaatagaagaatcctgtgcgcaggaaattatacagatgctcatggaaaagaagcttgattttgaaattaatacatcatcaggagatttttcgacagactgtgagttttgcgatacggcttgcccaatgcccgcagtggaaaaaatttttgatgcgcagattaaaattcaaaagatatttattttctcagaagagcagaataagttgaaaaacataaaagaatttctgaagaagagacaagatatcacaattacgtcatctgcagcctggaacatagagattacagaccggcaggtgaataagggaactatgcttgaacagatcgctgagtattatggatatagtaaagaagaggtattggtatttggggatgggaagaatgacattctaatgtttgaaaagttcccgcattccagagccatgggaaatgcagtagaaagcttgaaaaaaatcgcagagaaagtcatcgaatctaataaagatgatgcagttgcacaagaggtatgcagattgttgcaacatctaagtttgtaagcgcttggttgatatcagaagaaaaaatgataaaaaggacggagagttctgattgaaaatgtcagaactctccgtctttttatccatttattttacaacagctgtcgcgttcaatcagctgatgcggcacgataatctttgttgcaacaagattcggattctcaatatgattgattatctgtgatgccgcctcgatacccagctgcttagaattaatatcaattgaagtaagctgtggagatgtcgatcttgcaaatagagagttgttgaatgatataatcgacaaatcatcagggattgaaacatgattctgaagacaaactctttcaagagaaacagcaagaatatcatcacttacaacgattgcagttggcggttcatcctgcagtaacagagaagaaattgcgtctgtgttatctcctgatacattcagaacttccgcgcagtattctggacggaaagggattccgtgtttagtcaatgccatctggtaaccggtttttctgtctgcggcaaaagtcagtgaactgtcggaacccagataagcaatcttgcgatgaccgagttgatagagatattcggtcgcgtcctctccggcaagaagattatcattgtcaatatataatgtctgatttgtgtactgtgttgcttttccaatcaagatataaagaagcccttcgctgaagagataatcaataatcggatcgtcctttcgagaataaagaacgatgaacccatctacttttccacttcgtgacatagactgaatcgcttttaagatctcatcttcatcttgacctgtcacaacagtagacatgtattgcctttggttacagtagtggctgatgccgcgaattgcttcaagatagaaagcattctcatatacttcacgggcagatgccggaaggataatcccgatcgtgcgggaatactgagaagcaagattgctggcctgaaagtttacttcgtaaccaagttcgatcatcgctttacgaactttttcttttgtttctgtgctgatggatgggttattcttacaagttctggagacagtggaaggtgatacacctgccaaagcggccacatctttaattgttactgccatattttccctcctgtgaggaaatgaggatgtcaggagtctgacacctattttcctttattttcacgtaactgttcagagccaacctccaaaatgctacgcatttcgtcggtgtggcgtatccgccaaataaaatttcaaaaacagtcttaaaaatgcaagcattttatacctgttttttgaaattttgcttggttctgaacagttacattttcacaaaaaattcgtcacctactattttagtgaaagaacgcaatgatgtcaaatctgttgcatagttttttgcatagaaactgttgtgagaatgtacaaaaacagagcatataaattgtgcaaaaggcagaaatagaaaatagatctataaatagaattgcatttcgtgcaaaacgtgcatataattaatgcaaacggttgcacagaataatgcaacagaaagtgtgccacatgatgcgatggcatgcagggagatctaaaggaggaaacgaaaggaaagaagaaattcaatctcaattttgatttgcttcagatctgatcaattacaaagatgcaggaaatatggaggcatataaaactctgcttacaacagtaacaccggctcgtttcaaagtcggacagatgatcggagcaacaggtcttttacttggtgttgcacttgcaatgtatagaagagttgatgcagataagaaagataaataccgttctatgtttctctcaacagtacttgcagtatttcttacaggtgttactgagccactggaattcatgtttatgttttgtgcattgccattgtatattgtttatgcaattcttcagggatgtgcattcgcaatgtcaggaatcattcatctgagagtacattctttcggaaaccttgagtttattacaagaattccaatgtcgattaaagccggtctgggcggagacattattaattttgtgatctgtgtagttgcatttttcatcatcggatattttgtagcatattttatgatcggtaagtttaagttcgcaacaccgggaagacttggaaattatatggatgacaatgcagatgatgagactgcttcagcagcaactactgcaaaatctgaaagcggaaaaacagacgctaaagacagcaaggcagagagaattattgcactgctcggaggaagagaaaacattatccttgtggatgcatgtatgacaagacttcgtgtcacagtaaaggatttggataaagtagcagagcttgccgcatggaagtcagagggagcacttggactgattaagaaagataatggaatccaggctgtctatgggccaaaagcagatgtattaaaatcagatattaatgacatcttatgatgctaggattgtgagagtgcattgcacgaaacaatccttaggtatcataagtggggggattttagttcataacagacaatagaccggagaaaggtatgtagaaacttctccggtgcttttataggagtgagaagagaatgaagttaatgacattaaatacgcatagtcttgtagaatcatcttacgaagaaaaaaaagaaaagtttatagagacgttaatagttgagcaaccggatgtagttgctcttcaggaggtgaatcagactgcaagtgccggaatcattccggatgtaatgcttgccggatataagaggtgtatggatttcgggcttcctgtaagagaagacaatcacgcgaaagaagttgttgaagcactcagagaaaaagatgtatattattattggacctggttgtctgcaaagatcggatatgggaaatatgatgaaggaatagctcttttgtcaaagaaaccgattatgagagtaaagcagttcctgatcagccagacagatgattatgataactggaagacaagaaagattttaggaatgcagacagaaggaagcgacgacattttctttactgtacatatggggtggtggaatgatgaggaagaaccgctgaagaaacagtgggagaaaatggaaaagctgacgaaaagtctggaaaagaaagatcacaccatttggttgatgggagatttcaacagtcttgataatgtgaaacaggaagggtatgaactgatctgcaaaagcggatggaaggacagttattgtctggcagaacagaaagattccggtgttacagtggaagaagaaatcgatggatggcgcgatggagaaggcggtggagcagtgaaagatgccaaacgtctggattacattttctgtaatacgcagaaaaaagtaaagtcatcgaaagtggtatgtaatggtaagaattacccggtagtatccgatcattatggagtaatgatcgaggtagaagattaagaggaggaagataaaatgagcgaaagagcagcaggtattttaatgccaatcagtagtttaccgtcagagtatggaattggttgtttttcaaaaagcgcatatgaatttgtagattggctcaaaggagcaggacagagttactggcagatccttccacttggaccgaccagctatggagattctccatatcagtccttttctacatttgcaggaaacccgtattttatcagtctggatgaactgatcgaggaaggtgttctgacacgtgcagaatgtgagaaagtaaactgggggaaagcaaagggttctattgattacgagaagatttataatggacgctatccattacttcgcaaagcttatgagagaagtaagatcagtgagaatccggagtatcagaaattcgtgaatgagaatagctggtggttgtcagattatgcactgttcatggctgtaaaaggacgattcgacaatgtagagtggacaaaatgggcagaagatattcgtctccgttggaaatgggcaatggattattacagagaggaattgtattatgatattgaattccagcagtatatgcagtttaagttccacgagcagtggatgaaattaaagacatatgcaaatgaaaatggagtcaagatcattggggatatcccgatttatgttgcaatggacagtgcggatacctgggcgcatccggaattattccagttagatgaggaaaatgttccgacggctgtagccggatgcccgccggatggattctctgcgacaggacagctgtggggaaatccgctgtaccgttgggactatcatagagagacaggatatgcatggtggatttcaagactgcattatgtattccagatgtatgatgttgtcagaatcgatcatttcagaggatttgatgaatacttttccattccgcatggagcagagaatgcgatcggaggacattgggagaaaggtcctggaattgatttgttccgcaaagtggagcaggcacttggatggaagcaggttattgccgaagatcttggttatgtgacagattctgtccgtgagatggtccgcgagagtggttttccgggaatgaaggttctggaatttgcatttgattcccgcgactcaggatgcgcaaatgattatcttccacataactacccggtgaatagtgtggcttatacaggaactcatgacaacgagacaatcgttggatggtggagcagtatcacaaaagaagagcagaaactggcgagagattacatgtgcgaccagtacacaccggaaagtgaactgtataaatctctgatcagcctgattatgcgaagcagtgcaaagctgtgtgttattccgatgcaggactatttaggacttggaaataattgtcgtataaatactccgtctacggtaggaaagaactggaaatggagagtgaattcaagacagttatcattgaagctgcagaaggaaatctatgatatggcgctcagatacggaagaatgaattgggagacagtcgagtaggattttaaaagataggatgttattaaaaagagacggaggtttctgattacaaaatgtcagaaatctccgtcttttggttctctttaagtagttgtttttaagctacagtttttttcctcaacgtccaaagtgcaacaaccagtgtcaatatctcagctgccggtattgccagccagattccatttaattccaagaacctcggaagaattgtcaggaaaagaagcagcagagcaaaggaacgaaggaaagtaatcatacctgagatatatcctttgccatatgtcatcatacggattgctgcgaagatattgattcctgaaaataagaatccgagtccatataagcgcagtccggaaactgctatgtcaaagactgtgctgccgggagatgcaaagaaacgcactccaattggtgccagcagataagtgcatccgtagagaatgatcggtgcaattgcaaagaagcgataagcgtacttttctaaaacacgacagacagagaaatttctgtctccgtaagcatatcctagtggcgttgatagtcccatagaaaatccaaagtaaattccgatacataagaactgtaaatacatgatgattgaaacagcagcaacgccgtcttctccggcgaaaagtagggcacttcggttaaagacaatggttgtgatcgcaatcgcaagctggtttacgaattcagaagttccgttgaccatgctatgaaatgcttcctttatagataatccgtggaatgtaaaatgaaggaagttcggatgtgttacaaagtaaaccactcccattacaaaagaaagcagcaggccgaggaaagttgcaagtgcggcacctgtaattcccatatggagctgtccgataaaaatgtaatcgaaaacaatattaaaaatccctccggaaagtgctgtcagaaaactgtacgttggagaaccgtcaacacggatgaaataagtgaacatctcttttccaaccacgatcggagcaccgaacagccaccagtagatataagctttacaatctgccatcagcagtgaggttgcaccaagcatctgcaggatgaccggcaaccggaaaagaataagtgcagaaacaagagcgccaatgacaatggcagcagtcatgcttatagagaaagtccggctggcttcatcatttttctttccaccgatatgaagagcggcaagtgcacttccgcctgtcgcaaaggcaagtgcgataccgtacagaatatttacaagcggatagacaacattgatcgcggcaagtgcatttgttccaacataggcggaaacaaagattccgtcaacgatcgtataaacagtagtaaataatgaggtcagataagttggaatgataaagcgtaataatttctttaatcgaatctcatctacagattgaaaaataagagttttttccattggaaaccctccttgttaaaaaaatctcttagtatataataaaccttaaagatacatgaaggtcaataaaaagattttctgatcattatgaataagaagaaacgatactagcgtggaaaaatatgcaaaacatagaattcacaaataaatcaaaaaatgggattgatattcgcagaaacagtgactataattttttagttggtaagagaagtaatgagtggatgaaagacgtctaaggaggagttagatatgagcaatcaggagaatgtatttgaaacaattttagcacctatgaccggtacagcagtagcaatcacagaagtgccggatcctatttttatagagaagattcttggagatggagtcgcaattgttccgacagaaggtaaggttgtaagcccggttgacggaactgtatcaaaagtagcagagacaggtcacatttatgctgttacttccgataacggagtagaagttgtgatacatgtcggacttgagacagtcgcactgaatggaaaatgtttccagatccatgtaaaagaaggagacaaggtaaaagcaggagatcttcttgcagatgcagaccttgagtttatcaaagaaacaggacgtaattccatcacaccgatcgtcatcggttcaagccttgaaggtaaagatcttgtatgtgaagagggagaagttcaggccggaaaaacagttattatggaaattaagcagaaataagaagtcagaagatattgttccagaatcggtttagcttagaaggaaggttatagtatgaaagaagaaagatattcaatcatattcagcagcaaaacaggaaatacagcagagctggcaaatgcgattcgtgatgcattgccgcaggagaattgtgattatttcggaacaagcgaaatcgaagaaccggtatcagaaatgctttatattggtttctggacagatcagggaaatgcagataagtccgcactggaattattgcagaagataaagaataaaaaagtctttctgtttggaacagccgggtttggtgagaatgaagcatatttccagaaggttctgaataatgttaagagttctatggataaaagcaatcaggtggttggtgaatatatgtgtcagggaaagatgccgcaagcggtgagagaccgttatgtgaaaatgaaagagcagccggatcatatgccgaatcttgatctgctgatcgcaaattttgaccgtgctttatcacatccggataagaaagatctggataaactcagagagctggttagaggatagaaatagtaagaggaaagaagaagtcttcagtacgagggcttctttttttatatgttaggaaagttctttcctaacatataaaaaacgctccgctcaggatgcgcactgcggcgtacaaggtaggtgtcgcaagcgaccgccgcaggcgcaagaatgtgccgaggcacattctttgttctgaagaaaaagtaacagaggagatttcaaaaataagaataaaagtgttgaaagcgtgaataatagaagaaatatatttaaaaaacgtgaaaaaattacaaatataggcgcgtaaaacgtgaaaaataaattgacataggctcataaaacgtgatagccttgaaaaaaggaggggattctatgtatttaaaaagaaagatagatgagtatctgttagagtggaaagaaaaagaagaaagacttccgttaattataaaaggggcaaggcagattggaaaaacggaatctattaatcactttgcaaatcaaaaatatggcaatattgtaagtattaattttgtattggaaccgaaatataaaacaatactgagtgatggatatgctgttgaagatattataaagaatatttcaatgatagatacatccaaaaaattcatcgagggagacacattgattatctttgatgaattacaggagttcccagatattgcaactgcgttgaaatcatttaaaatcgatggaagatttgatgtcatatgtagtggttctttacttggaatcaattacagaaaaatccatagcaacagtgtgggatataaaacagattatgaaatgttttcaatggattttgaagaatttttgtgggcgaaaggatactcagagaagaatattgaagatatactaaaacatatgcagacaggaacacctttttcagaaacagaattatcagtttataagaaattgtttttagaatattgtgtacttggtggcatgcctgcagtagtaaaagtatatattgaaaaaaacctcttcacagatacgatagaaatccagaagcagattcaaatggattacgaagaggatattagaaaatacgctgaaggtttggatcagactaaaattgtaagtgtctatcggaacgtacctgtacagcttgcaaaagaaaataagaaatttcaattaagtaaaatagacaaaaaagccagaagccgagaatatatgggatgtataacctggctcgaagatgcaggcgtgattactatatgttattgtctgcaatatccagaacttccattgaaaggaaattatgatgactcaaaattcaaaatctattatccagatacaggattattgatagcttcactagatgaggaggcacaagaagatcttcgggcaaataaaaatcttggagtatacaaaggagctttatatgaaaattttgtagcagaggcatttgtaaaacagggacttggactgtattattataaaaaagaaaatgctactttggaagagggtttttttgtaagaacaaaagatgagctggttccggtagaagtgaaggcaaacaagaaccgttctaagtcattgagacaattgatatccagtgattcttatggggatattcattggggaataaaacttgcagatagtaatgttgggatagaagacggaatttatacatttccatacttttgtacatttctattaaaacgatatctaagggaaaaagatgaagaaaaaattgtttgacttttagattaacaggaaatataataactacaaacgagtagcaagtaagcgtaaatccagtttaccggctgctcgttttcttttattaaaatagaagtaactgttcagaggcaacctcccaaatgctacgcatttcgtcggtgtggcgtatccgccaaataaaatttcaaaaacagtcttaaaaatgcaagcattttacacctattttatgaaattttgcttggctctgaacagttacaaatagaatatcgccatgaaaaagtgtgtagcctgtcagcgtaagtccagcttataagacaaggtacgcactttttttgtgcagaaaagagaggagtcaaaacaaaatggcggaaagtaacaagatgaaagacatgccggtgaataagctgatggcccagatgggaatcccgatgatcttatctatggcattgcaggcggtttacaacattgtagacagtgcatttgtaggaaatatgagagtgggcagtgagtcggcattaaatgcattgacactggtattcccggtccagatgctcatggtcgcagtgggaatcggaacaggtgtcggaaccaatgcgcttctggcaaggacacttggccagggaaacaataaaaaagcagcaaaggtagcaggaaatagtttgtttcttggtatgatcatttatgtggtctgtttactgtttggtatcttcggggtgaaagcatacatttcatctcagacagtagatgcagaagtacttcagatgggtgtcagttatcttcggatatgctgtgtgatctcttttggaattattttcttttccttgtttgaaaagttattacaggcaacaggccgttctctttattctacaattggtcaggtggtcggagcagttgtaaatattattcttgatccgattatgatctatggtattggaccttgcccggaaatgggcgtaaaaggtgcagcttatgcaactgttattggtcaggtagcatcagcagtattgctgttcattttccatatgaaactgaataaagagtttaaacatgatataaaatatatgaagccggagggcggtgttataaaggaaatctatgcaatcggacttccggcgatcattgcacaggcattgatgtctattatggtttatgtaatgaatctgatcctgaagttcaatccgtcagcacagacagcatatggtttgttctataaggtgcagcagtttgttctcttccttgcatttggccttcgtgatgcaattaccccgatccttgcatttgcttatggaatgagaaacaaaaagagaataaaggatggaatcaagtatggcctgatttatacaatcgcattaatgattcttggaattgccattacagagattttccccggggcatttgcaacactgttcaatgcaggacagtcaagagaatattttatcggagcaatgagggtaatctcagtcagctttctgtttgccggaattaatgttgcttatcaggggatttatcaggcattggacggtggtatggaatcgctggttatttcacttttgagacagcttgtcattatcctgccactggccggaattttttcgatatttgtcagaaatggacagatgggcgttacattaatctggtgggcatttccgatcactgaaatagtttcatgttttgtgggatatgtgttcttaaagaaaatcagaaaaaacaaggttgatgttttaagttaaggaggaagcggagatgacaaaaagaattattacaatcagcagagaattcggaagcggcggacgttttatcggagaagaagtagcaaagaaacttggaattgcttattatgataaaaatatcattaatgagattgcagaaaagtctggtttatctccggaatatattcaggaaaatgcagaattatcgccgaaaaaaggattattcgcatatgcatttgccggacgtgacgtcacaggaaaatcagtagaagacctggtctatgaggcacagaggaaagttattttagagctggctgaaaaggagtcttgcgtgatcattggaagaaatgcagattatattctgaaagaccgggatgatgtgctgaatgtgtttattcatggagacacaccggaaaaaatacagcgaatccgtcagatatatcatgtcagtgaaaaagatgctgttaaaatgatggaagatacggataaaagacgtatgacgaattataacttttatacagaacaaaaatgggggaaagccagcaattatacattgtgtttgaatacttcccagctcgggtatgacagatgcgagaagataattatggaatgcttagaataaaaaaatagcactcacctagtgacagtgctaacatacatgtgctatataataactagaacaaaggaagagagaaagataagaaagaaaaaaattttcatcctccgaaatgttctgacaacaactgcgaaagcagtttatataaaaactgtgaggtttcctcacaggggcaacaaagtttgttagcattgaaaggagaaatgacttatgatgatgcctagtatttttggagaaaacttatttgatgatgattggatgaacttcccgtttgatcaggatttctggggaaaaaagaatccgttatatggtaaacacgcaaagaacatgatgaagacagatatccgtgaacatgaaaaaggatatgaagtagatattgatcttccgggattcaagaaagacgagatcggcatagagcttgagaatggttatctgaccgtatcagcagccaaaggtcttgacaaagatgaggaagataagaaaggtaaatacatccgtaaggagcgttatgccggagcaatgcagagaagcttctatgttggcgagtatgtaacacaggaagacatcaaagcaaaatatgagaatggtattttgagactgtccgtgccgaagaaagaggaaaaaccagtcgaaacaaagaagaccatcgcaattgaaggataatctgattccggttttggaatctcaggtaaagtgaaaagaggagcgaaagctccttttttcatgtcaaaaatcaggttgcaaacgataatacttgcataataagaggagtagctctataatcttaaataagaaaccctactattttactaggataataaaaataagttttccagcaaaaagtatagaaaataagaaaggggcagattatgaaagtattttggggaattttaattccgtttttcggaacatcattaggagcagcgtgtgtatttcttatgaaggagacacttagtgataaggtgcagcgggcgctgacaggatttgcagcaggggtgatggttgcggcatccgtttggagtcttctgattccggcaatcgagcaatcagaaaatctgggtgcattttcttttcttccggcatttatcggattctggctgggcattctttttctattggcattggatcatatcattccgcatcttcatatgaatagtgagcaggctgagggaccgagaagtcagttgagacgtacaacaatgatggtgttggcggtgactctgcataacattccggaaggtatggctgtcggtgtaatatacgcaggttttctggctggagatatgcagattacagcggcaagtgcatttgcgttatcacttggtattgcgattcagaactttccggaaggagcgattatctccctgccacttcgggcagaaggagaaaagaaaagcaaggcatttctcggcggagttctttcaggtgttgtagagccgatcggagctgtactgacactggctgcggcacagttgattctgccagcgcttccttatttactcagttttgctgccggagcgatgctctatgtagtaatcgaagagatgataccggaaatgtcacagggaaagcattcgaatataggaacgctcttttttgctgtgggattcagcattatgatgatgctggatgtagcgtttggataacaaatttacaaacatagaaataatttggatacaaggtgtcaggcaccattattccgtatccttaataaaataagcataaagacaggggttgagttctctcatggaagaagggaggatggcaacccctaaaccatgtttggccaaagttatggcggttctgtcatagagcgctttaccggtttcggttagagtaatttgtgttatacttggagtcagggaaagaaagcaaaaaaggaatgaaagtatgaaacgaattgattttgaacacggaacaattacaggaaatattttaggcgcggcattaccgatgctggtggcacagatattgagtcttttgtataatatcgtggatcgaatttacattgcaagaattccgaaagtcggaacaacagcacttggagctgtgggcttatgttttccaattattgtgattatcacagcattctgtaacttgttcggaagtggcggcgcccctttattttccattaatagaggaaaaggaaataccaaaaaagctgaaacaattatgaatacatcattttcaatgatgtgcatttgtggagtggtattgacggtaatcggcatgatgtctgcaagtccgatactggtattatttggtgcatcagaggaagggttatcttatgcgtatccatatatgatgatttatctgataggaacagtgccatccatgattgcaacaggaatgaatccttttattaatgcacaaggttatgctacatcaggcatgctgtctgtaacaatcggagcagttgccaatttaattttagatccattatttatatttggattgcatttaggaataaaaggagctgcaattgcaacgattatttcacagactttatcagcagcatatgtattttattttttaagaaaaaactcggagataaaagttcgaatgctctccaaggcggaatggaaagtatgtggaacagatgcaaaaaatatcgtgagtcttggtagtgcaggatttattatgcagctgacaaatagtgtagtaacaatatgttgtaacagtgtgctgtcaggtatcggaggagatgtttatatatcagtgatgacaattgtatcaagcatccggcagatggtagagacaccgatttatgctatgaatgaaggaagctctccaattttaagctacaattatggagcacagcgtccaaaacgtgttagaaaagcaattagagtaatgacttgcatgattcttatttatacggcaatcatgtggagtgtgattatttttgcaccggaatttttgatcggaattttcagttcggataaagaattactggtagatgcagtagaagcattgaagttgtattttgcagcatttatatttatggatctgcaatatattggacagacggtatttaaatcattaaataaaaagaaacaggcaatcttcttttcgttacttagaaaagtatttatagtcgtgccattaacatatttgtttccatatacatttcacatgggaacaagaggtgtgtttttagcagaaccgatatcaaatgtaatcggaggaagtttgtgttttattacaatgctggcaattgtgatgccggagttaaagataatgaagaaggaaaattaaaaaaattagcactcacctcttgactcggctgaaaactgcgtgctatataataaatagaacaaaacaaaaggcaacaaagttagttagcattgaaaggagaaatgacttatgatgatgcctagtatttttggagaaaacttatttgatgatgattggatgaacttcccatttgagcaggacttctggggaaagaagaatccgttatacggtaaacacgctaagaacatgatgaagacagatatccgtgagcatgacgcaggatatgaagtagatatcgatcttccaggattcaagaaagatgagatcagcattgagcttgagaatggttatctgaccgtatcagctgctaagggtcttgacaaggatgaggaagacaagaaaggtaaatacatccgtaaggagcgttatgccggagcaatgcagagaagcttctatgtaggtgagaaccttacacaggaagatatcaaagcaaaatatgagaatggtattctgagactgtcagtgccgaagaaagaggcaaaaccagttgagacaaagaaaacaatcgcaattgaaggatgatttgaacactgatgtgagtcaggtgtcaaatgtcgaaggggcttatgtaagccccttctttttgtgcgtaaatctatttatacgtgtataaaacatattttttcagtacaaaaacgttcataaattcggttgtaaatatttacgattgtttttatgaacgtttttgtatataatagaatcaatgggattggaaaggatgtgggtgatatgcgtgaaacacgaacattagaattcaaggaaacgattacaaatacttttttgaaaacagtaagtgccttttcgaattatgatggaggaaccattgtctttgggattgatgacgatggaaagatcaaagggttagcagatgctaagcaatcgtgtctggatattgaaaataaaataaacgacagcatttctccacaaccgaattatacacttgagatacagaataatgatcagacaataaaacttactgtaaaaagtggacttcaaaagccgtatttatacaaatcaaaagcatacaaacgaaatgatacagcaacgatagaagtcgatacactagaattttcaagacttattttagaagggcaaaatatcagatttgaagaactgacatgtaaagaccaggagttatcttttgaagtgttgcatcgcaaattatcagaaaacattcagattgaaagttttagcaaggatacattgaaaacactgaacttatatgataatgacaatggttacaataatgcagcagggctgttagcagataaaaatcattttccaggaattgatatggtaaaattcggtgaaaatatcagtatcattcaaaaaagatcaacatttgaaaatatatctgtattagaagaatatgataagtcagtaaatgtgtttagagattattatcaatatgaagtaattcaaggaattgaaaggaaaaaggtcgagaagattccggaagctgcgtttagagaggcgattgctaatgcattgattcacagggcctgggatgtagaagcacagatcagggtattgatgtttgatgacaggattgaagttatttctcctggaggtttgccatccggaataacaagggaagaatatttgtctggtaaactttctgttttaagaaaccggaatcttgccaatgtattttatcgtttaggttttgttgagatattcggaaccggaatcacacgaataaaacaactgtatgaagaaggattgatgaaaccagaatttgaagtatcagagaatacgattaagattgtacttccattatttgcaaagaacatgaatctttcagaggatgaaaagatgatttatcggattcttagccgaacaatgctgaaaccagtgagtgaaatcataccgtatgtaccgtttggtaaatcaaagacgacaaagctgttgaaagagatggaacaaaaaggtgttatagatatccaagggcgaggaagaggtacgaaatatataataagataaatatgaatcataaacgcacaaaaaatcagccgtaaatatttacgactgatttttgcgcatttataattcatttgcagtttattcagtttcagctttgattccctgctcgaaaatctcaacagctttttcattcggttcggcagtaagattagccacaacgacagcaatcaaaagacttgcgaagaatccagggatgatctcgaagatacctgtggcatctgtcattcctgtcagcagccatccaagatctacaacgaatccggagattacacctgctacagcgccctggtagttaaagcgtttccagaacagagacagcaggattgtaggtccgaaggaagcaccgaaagcgccccatgcattttcaaccatatccataatagcctgagcaccgcttcccttggagttcgcgataccgaaagcaatcagggagaggatcagtacgaggatacgtccaaccatcagtgtctctttttcagaagcattttttctgaagaaaggcttgtacagatccgctgtgaaggagctggatgctaccaacagctgggaatctgctgtggagattgaagcggcaatgatcgctgcaagcagaagtccacagatgccggcagggaagaactttctggccatagcaatgaaaacaagtttctgatttccctgagtaagcagttccgcacccataaccattcttccaaagtaagcaatcaaaacagcagagaacagtgagatgattacccatacgatagctacgatagaagatttcttgatcatggatggtttctcgatagacataaaacgtaccaggatatgtggcataccgaagtatcctaatccccatccaagtccgctgacaatatcctgccagctggcatcaaagataccgcctccgaaagcacactgtgttacagcgcctgtagcggcatcagtatactcatataccgtagtaagagcagtaggatccaacagatcactgtgaccgatacagactacaagaggtacaagcatcagtgcaagcatcatcagtaatccctggaagaagtctgtccagcaaacagcagtaaagccaccaaagaaagtgtaggcaacaatgatcagcaagaatgcgaacatagcaatcttaggagaaactgttgggaacaaagttgtaaatacggaagtaccggctaccagtgcagatgctacataaatggtatatgcaaacaggaagatcagtgcacatgtcaactgcagtgatctggagtctgttgcaaaacgatttgtcagatactgtggtaatgtgatcgcatcatctgcagctttagagaatgtacgcagacgttttgcgcacagaatccagttggcagctgtacctaatgcaagaccaataccaatccacatctgtccgaaaccgaaagctaagatcgatcccggaagccccatcagcagccatgcagacatatcggatgcctgtgcggacagtgctgttacccaaggtcccatggatcttccaccaaggaagaagtcctcggagttcttattggtaccgttaaagtaaaatactaacgctacgccaagcaaaatggcgaaatacgcaataaaagtaatgatttcccaattcatattcttttatcctttccttatattattttatatgatgatatcgggcaggattgtaagaaggcatagcatttatacaatccataggtatcaaaatcataactgaaggcgtttttaacccacaataacatttaatttaccgcaattggacggatattgtcaatagtttgaggaaaatacgttgttgcccggtatttttcatgttttgtggttagttaaagcgaacagattattttttaacaaattatgtaaaaatcacgaaatattgatggaatatcgcgtggtattgtgagataatagaaaagtaagagttgtgttctaaaaaatagaaaacgaggtagaacagcatgaaactgatcaaagaaaagaagatctatacaggggatggtatgattgaaaatggttatatccgcttcgatgagaagattgaagaagtcggagatatgacaggatttgagccgaaagaagatgatcttgaggtgaactgtgctggaacgatggtggttccgggatttatcgatattcatagccatggtggttatggaaaagataatatggatgctacaccggatgagattgatgagatggttaagcagatgacaaagcaggagggaatcacaacttacttctgtacaactatgactcagacctatgagaacatcgagaaagcaatgcagaatattcatgatgcggcacagaagaacccggtgatcaaaggaatccacgtagagggaccatttatctcaactgtgtttaagggagcacaagatccttcttatattaagaaaccagatgaaaacacactggaaaaatggaatgagatcagtggtggactgatccgtattgttacttatgcaccagaagaggctgatccgtcatttgagacatggtgcaaggaaaatggagttgtcttaagcgcaggacattcgaatgcattatacggggaattgaatgcaagcggagcaacacatgtgactcatctttacaatgcacagcgaggactgaatcacagagagccgggggtaacaggatatggtatgctggcagaagggatacacgcagagctaatctgtgacggaaagcatattgtaccggatatggtgaaactcgcatgcaaagtaagagggtatgatggaatcgagctgatcacagactctatgcgtgcgaaaggaatgccggaaggaaagagcgaattgggcggacaggtcgtaatcgtaaaagatggtatggcaaaactggaagacggaacgatcgcaggaagtatccttacatacattcaggcatttaaaaatgttatggaatttacaggagctactgttgaagaagcggttaagatgacatccggaaaccaggcgaaggaatttggacttgagaccaagggtgcaatcgcagttggaaaagatgcagatatggttgtattaaatgatgcgtttgatttagtacagacaatcagctatggtaaactcgcataaggaataagaagttataaaatatatttactgaagcaggaagcaaatagatttgatctatgaaaatatggggtggcttccaaagcactcgatataaatataatgaaatgagagggtattaaacatggaagtaattgtaaagaagaattatgaagagatgagcaaggcagcggcaacattgtttgcagcagagatcatggagaatccaaagacaatccttggaatggcaacaggatctacaccggttggtctgtacaaagagcttgttaagatgtatgaggcgggagatcttgatttctctcaggttactacattcaacctggatgagtatatcgggctggcaccggagcatgatcagagctatcattatttcatgaatgacaatcttttcgatcatgtaaatatcaacaaagagaatgtacatgtaccggatggggttggatttgaagctggagaggcaggaaaagcatatgaagagctgatggcaaagacaggacaggtagaaatccagctgcttggacttggatgcaatggacatatcggattcaacgagccggcagatgagtttacaaaagtaacaggtgagatcgacctgacagacagcacaattgaagcgaataagcgtttctttgagaagaaagaagatgtgccgagaaaagctgtttctatggggatcggaacaattatgcgtgcaaagaagatcgtacttcttgtaaacggagagaataaagcagagatcctgaaagaagtagtaaacggaccggttacaccaaaggtacctggaagtatcttacagttccatccacatgtaacagtgatctgtgacgaagaggcagcaaagtacctgtaaaattcctctaagaggtccttaactgacatacggttaacgcttaatagcagcttgtgtccagagagacttcttagtaaacgataagaaccatgaagaagctgccaacggcagcttcttctaatatataaaattcttgtaactattcagagccaacctccaaaatgctatgcatttcggaggtgtggcgtatccgccaaataaaatttcaaaaacagtctaaaaaatgcaagcattttacacctttttttgaaattttgcttggctctgaacagttacaaattcttaattattgaaggaaaacagaacagatgaaaacaacaatattagaagcatgcacagattgtgtacaatcagcgatcaatgcgcagaaaggtggcgcagaccgaatcgagctttgtagtaatcttgtgatcggaggacttactccgggaaaagcattatttgatcttgtaaaaaaatatacgaatatcaagacaagagttcttcttcgtccaagatatggagattattgttatgaccagtatgagtttgaacagctaaaagaggaagttcagatgtactgtgagatgggagctgatggagttgtcatcggaatgctcaatccggatggtacgttggatacagagcatatggcagagcttattaaggcagcaggaaataaagagaaagcgcttcaccgtgcatttgatgtctgcatagatccgatgaaagcactcgaagaagccattgaacttggatttgatacgattctgacaagtggacagaaggaaacagcatgggaaggaagagagatgctgaaagcacttcaggaaaaaagcgcaggaagaatagaaatccttgccgcaagtgggattggtgcagaatcaatagaaaagcttcttccatatactggaattacttcttatcatatgtctggaaaaatcgtagtggacagtgcgatgaaatatagaaaagaaggaataggacttggattgtcagagcgtggagattatgcgctctggcagacttcggaagaagaaatcgtgaaagcagtaaaggttttaaaaacaatagattaacttcaacagacgtgtcttgcacagcttgaaaaaaacagttatactcatagacaaaggtaaaaacagtaacaattttaacaggagaaagcggattatgatcaaagtaatagcaagtgatatggatggaacacttcttggagacaatcataaagtagcaccggagacagtagaagcgatccgtgaagcacaggcggcgggaatccgctttatgatagcaaccggaagaagttataatggagcaatggaagaattaaaagatctggatcttggctgtgattttattgtgggctcaggcgcagaggtacgcaacccaaagggtgaaattctaaaaagcataggatttacatatgaggtctgcaatgaggtggcaaaggtattggaagaatatccaatctcggtattgtattgtgccggaccttatgagtatcgtgtgggaacaccggaggaagtagaggagagtattgttcgtcagattcagttgttccatttatctgagtgcagagaccaaatagagcagtcagaactttataagcgagtgaaggcaagttcaagacgaatcgattctgtggacgaattagagaaacagggaattataatccataagattttcctttttacaggcgatctggagatgcttgataagatcaagcgcagactgatgcagaatccggagctcgcagttgcgtcttccttctataataatctggaaatcacggtaaaaggagcggagaaaggacctgcgattcaggaatatattgaatctttaggttatacaaaagatgaagtgatggtatttggtgacagcctgaatgattactctatgttgtctatggattttggcgcaactgttgcgatggaaaatgcagatgatgaagtgaagcaggtttcaaaatatgttacaaagtcaaatgaagacttaggggtggcatataccattcatgaactgttgaaaaagcaggggaaaatcaattcagattgtgaataacttttcaaaaaatgaaactgtatgttgataacacaaaatgaaagcgaggcaattaagatggatgcaagacagaaaagaaacaaagtacttggagaacgtgtggtgaaagcgcttgaatccagaaatatggatgcttattatgctgagacaaaggaagaagcagtgaagaaagcactggagtggattccggaaggaagcacgattaatatgggaggttcctcttctgttcgtgagtgtggattgattgatgcaatctgttccggaaattataatttctgtgacagagataaagcatctacacaggaagagaaacagaaaatcgcgagagcagctttttcctgcgactggttcctcggaagcgtgaatgcgatgagtgaggacggtgtcttcattaatattgacggaaatgcaaaccgtgtggcagcatatgcatttggacccaagaatgtacttttaattgttggtatgaacaaagttgtaaagacacaggaagatgcaatgagcagggcgagaaatgaagctgcacctgtaaatgcacagcgttttggaattgatacaccatgttccaaggctggaagctgctttgactgtaagagtccggaatgtatctgctgtcagatattgatgacaagattcagtcgtcaaaaggggcgctttaaaattatccttgtagacgagaatcttggcttttagagaatagaataagtgggggaaaacaaatgggaagaaacgtaaagaagccggtacgccgcagaggggcaaaacggcaggcagagagaagaggcgggcgaaagaaaaaacgtgttgcatttgatgtagtaacaacgacgattttgatcgtggcaatctgtgtttttgcattttcactttttcagttggttaaaatgctgataccgtactattccggtggaaaagagtacgacaaactcaaagataaagcaattacgatagagactacgaaggattcagaggacacctcggaagctcgatttaaggtggattttgatgtactcttgcaggaaaatccggatactgttgcatggatccgttttgatgaaccgtcgatcattagttatccggttgtgaaaagtgcggataataaggaataccttacaaagacatttacggaaagtgataataagcttggtgctattttcatggatatgagaaatacaagtgatttctcagacaagaatacaatgatttatggtcataatatgaaaataggcggagagatgttttcgcagctgaaagagtatgaggaagaatctttctataaagaacatccgaatttctatatttatacaccggatggaaaaacaaggacttataccgtgttttcagcagctgttgtgaaggatactgcagatcagtataatctgacgtatgcgacagacgaagcgtttgagagttatttgaaaatgtgtaaagaagattcagcatatgacacaggaacagaagtgaatgcgcagtctcagattgtcagtctttcaacttgtaccaatgtaagagaagatgagagattccttttgcagggagtattgacggcgacagacggaggagaagattagaatggcagacagatttgatgtaggcgacattattaagatgaagaaacctcatccatgcggaagtcaggagtgggagattctccgggtcggagcggatttccgtctcaaatgtatggggtgtgggcatcagattatggtgccaagaaaattggtagaaaaaaatacaagacaaattacaaaaaaggcttgaaacaacaaattctttatggtattataagaaactgtgacatgctgatggaacaattccaatcagtcattcaatttccttgttcccgggaggaaccgggggccaagagaccataaggaggtaaaataagatgaataagtatgaattagctgttgttgtaagcgcaaaactcgaagacgaagcaagagcagaagtaatcgagaaagtgaaaacaatgatcactcgtttcggcggtaatgtaacagacgttgatgagtggggcaagagaagattcgcttacgagatccagaaaatgaaagaaggattttattacttcatccacttcgaggctgaaagtacagttccagctgaagtagagcagcgtatccgcattatggacaatgtactcagatatttatgcgtgaaacaggaagcataagcggaaagaggtatatatgaataaagtagttttagtaggacggttaacaagagacccagaagtgagatattcacagggagacagtgctacagcggttgcaagatatacacttgctgtagatcgcagattcagaagagacggtgagccgacagcggattttattccgtgtgttatattcggacgttccgcagagtttgctgagaagtatttccatcagggaatgcgtgtctcaatttccggacgtatccagacaggaagctacacgaacaaagatggtgtgaaagtatacacaacagaagtgatcgtggaagaacaggagtttgcagagagcagagccgaggccgaagctaacagagcaagtttccagcgtcagtctgcaccgagtccggcacctagcgcagatgcaggtgatggcttcatgaatatcccggatggtatcgatgaggagttaccgtttaactaagtcggaaaggagataaccatcatggcttacgaaaaaggaagcagaccagagggtggattcaaaagaagaggcccagctcgtagaagaaaaaaagtttgcgtgttctgtggtaaagaaaacaacgaaatcgattacaaggacgttgcaaaattaaagaaatatgtttctgaaagaggaaaaattcttcctagaagaattacaggaaactgtgctaagcaccagagagctcttacagtagcaatcaagagagctagacacatttctcttatgccttacgttcaggactaattgagataattagctaataacaagatcgaatttttggagaaattcagaaattcgatctttttgcttttttctaactcatttttgcataatacaacctatagcatcttaggggaaaagatgctataatagattagctatattgtaattagtcacatatggtggtgattgatagtagtcccaggtgaggtattagttatgaaaaagaataaaatgcagctgaagggacagctcagaatgtacatgcgatggccgctgatcatgacacttctcttgattggcatggatgtatgggtgtacatggtggacaagaaagccggacttttgatgtcagtgttcataattatatatgtaggaatcgctttttcgctgtatttctataacagatctttgatcctggcagatctgatccagttttcagtacagtacaaaggtattgaaaaccggctgctcaaagaactggcaattccctatgcgattgcgcttgaagatgggaggattctgtggaagaatgattgttttttaaatctgacagagggtcagagaaaagaacgttatctgaaccgtatgattccagaattacatccgggtgtgtttccaaaaaatgatgtggatcacgtagaattggaagtaacttatcgtgaaagaagttatcaggcagagcttcgaaaagtatcattggagggattcagtgagaaagaagagttgcttcagattccggaagagcaggaatattttgttgcagtttctttaagagatgtgacagaactgaatgcctacatccgagagaacgaagaccagagaatgattgccggattgatttatatcgataactatgacgaggtcatggaaagtgttgaggaagtcagacaatcccttctcgtggcattgatcgaccgtaagatcaataagtatatcggagacgtagatggtatcgtaaagaaactggagaaggataaatattttatcgtacttcgaaaggatgcttataaaaagctgaaagaagacaagttttcccttctggaagaggtaaaacaggttaatatcggtaattcaagatcagcaacgctgagtattggtttgggattgaatacggcaacgtatgcgttgagttaccagtatgcacgtgtggcaatcgaccttgcacttgccagaggcggggatcaggcagttattaaggactgcaacggaattacgtattttggtggtaagaaggagcagacagcgaagaatacacgagtgaaggcgcgtgttaaggctgaggcacttcgagagtttattgtgaccagagacaaagttattgttatgggtcataagattgctgacccggattcgtttggtgcatgtatgggtatttaccgtgctgcagtaagtctggagaaaaaggcacatattgtgatcaatgaagttacaggatctgttcgtccgttgtatgatgagattctggagagccctgcatatgaggatgatatttttattacgtcagaacaggcattggattatgtggatgacaatgcaatggtcattgtggtagatacgaacaagccacagatgacagagtgtccggaactcttgaagagatcaaagatgattgcagtgctggatcatcacaggcagagcagtaatattattgagaacgcggtactttcttatgtggagccgtattcctcttccacttgcgagatgatcgcagaagttctacagtatatggtagatgacatcaaattcccggcacttgaagcagagtgcatgtatgccggaattatgatcgatacgagaaactttatgaaccgcacaggtgtgagaacctttgaagcagcagcatttttgagaagatgtggtgcagatattacacgggtacgtaagatgttccgtgatgatatggcatcttatcaggcaaaggctgaggcagtccgcaatgcagaagtttatcgtaaggagtatgcgattgcagtatgcccaagcgatattgacagtcctacagtgcttgcagcacaagcggcgaatgaattgttggatattagcggaataaaggcttcttttgtattgacagaatatgaaaataagatttatatgagtgcgcgttctatcgatgaagtgaatgttcagattatcgcggagaagctcggtggaggcggtcatattaattccgcgggagcacagtttgaccacacgaatatgcatgaagcagtcagtgcattgaaagagactattgataaaatgatagaagaaggagatatttgataatgaaagttattttattacaggatgtaaaatctcttggaaaaaaaggagagatcgtaaacgtaaatgatggatatgctagaaactttatcattccaaagaagcttggactggaagcaacaggaaagaatctgaatgatctgaagcttcagaagaataacgagaaaaaagttgcggaggagaacctggaggcagcgaaagaacttgcagctaagatcgcagaagctaaaattgtaacacacatcaaagttggagaaggcggaagaactttcggttctgtatcaagcaaagagattgcagaggaagtaaaagcacagttgaatcttaatgttgataaaaagaagatccagttaaaagaagcgatcaagacactcggaacacacaacgtgtctgtaaagcttcatccacaggttacagcagaactgaaagtagttgtacaggaagaagcataaggagacgaaatctttatggatatggaagcagcaatgaaacgaattcctccgcatagtgcggaggcagagcaggcagtgctcggtgcgatgctgatgaacaaggaggccatcacggtggcctccgagatattatcaggggatgatttttatcagacagcatatggaatcttgtttaattctatggtggaactgtttcatgcgggaaaaccggtcgatctgatcaccttgcaggaatatttgaaagaaaaggatgtcccgccagagatcagcagtatggagtttgcaagagatttgctgatgggaacacagacttctgcgaatatcaagagctatgctgaaattgtacgtgaaaaatcaatcatgcgtcgcctgatcaaagtaaatgaagagacagcaaatgcctgttatctgcagaatcagccattagaggagattttggaagatgcacagaagcaggtttttgcacttgcagagacagggaattcagaagagtatgtaccgatcaagcaggttgtactcaatgcattggatgtaattgagcgtgcgtccaagacaaaaggaacagtaacaggaattccgacaggattcattgatcttgattataagttgtccggtctgcagcgctcagaccttgtactgatcgcagcccgtccttctatgggtaagacagcgttcgtattgaatatcgcacagcatgtggcatttcgtcagaataaagcagtagcaatcttcagtctcgagatgtccaaagagcagttggtaaaccgtttgttctcattggagtctcatgtggatgcacagatactaagaaccggtaatctgtcagatacggattgggagaagttgatcgaaggagccggaacaataggatcatcaagaatgatcattgatgatacgtcaggtattacgatttcagagatgcgctcaaagtgtagaaaatacaagctggagatgggacttgacctgatcattatcgactacttacagttgatgagtggaagcaattcaagaaagaatgagagccgtcagcaggagatttctgagatctcccgttctttgaaaggtcttgctagagaattgaatgtgccggtgcttgcactgtcacagctgagccgtgcggttgagcagagaacagataagcgtccgatgctttcagacctccgagagtccggagcaatcgagcaggatgccgatgtctgtatgtttatctatcgtgatgactattataatcctgacacggaagataagaatattgcagaaattattattgcaaaacagagaaatggcccgatcggtaccgtgcgtcttgcgtggatgccacagtacactcgttttggaaacgagctgcgtcagcaggatcaggagatgtaaaaaagaaaaggacaggcacttgttggagagcctgtcctttttcggtatacaaatccaataaatctaccggtatgtgcagtgtgcaattagaaatcgaagaaatgctatgtaaatctttttttgaatctcagtaccggactattcttcacactttctcttcgggtcgcctgctgctggcgaatcaggctgtccagtttacggaaatgttcttcttcctgccgttcttttgcctggaaaagaaaatccatctcacgtatgacatcggcggtgacctgagtgctgatttctttttctaatgttttgttattttcagtaacaacttccgtaagtacctctccgatgagtgaacgtacatgttccagctgggtatttgtgatgacttcgaccggagtagtggtggtggccggtttgcactcagatgtcaggtcaggtgcgggtgttttggcaatggcattcttttccttgttttcagcgtgtctcattatctgacgtgtagatttcaactctgggatcaatggcttcagatcgcgaagcagaaccccttcattcttaagttttttaatacagcaaaagagctggatatcatcctgggtataatatcgatgtcccatctctgtgcggccgataggaatatgaagttcatcttcccagtaccttaagacatgggattctacctgaactttcttggcagcttcagagatcataaatctgacttcacccattgattttctatcctcctgttagaatcattgcgattactgttctgatttcgctacattcattatagcatagagaaattatgaaaggagtgctaatcgttcgtcaaattatggcaaaaaaagaaatcctgctacatcgaatcaatcagatgagcaggatttctgcgttttgtgatcacttagcgcttataaattatgcctcagagatagcgcctgtaggacaagcagcctcacaagctccgcaatctacacaagcatcagcatcgatctcatatttgccatctccttcagaaatagcgcctactggacattcgccttcgcaagtaccacagcttacacattcatcactaattacgtgtgccattgtatgtaccctccttttttggattacgataggtttttcccttttcgttatcctcattttaatacaagatggggaaatatacaagagttcctgatgtatttatttgagtaatttataagttagtcttatagaacttgtgaacgtggaaaatagaagatttctatcctaaattagtaaaaaacaaaaattcacgagattttaagaaattatctcttccatttttcaaggattcgtgtatcataatggattgagagttaaaaagtagaaaacatagagataaaattgtgtaaatgaaaagaaggagaaggttatgcggaaacgaaatgtaagagcagcgattgcggcagcactttgtatgacggtacttgcagccggctgcggaaagaaagcagatgatccggtttttacaggagataagacagaaacaccggtatatcaggcgaatctggatgcaatcaaatcttctgcatatgcatcggtagacaatctagatctggaacctggaacttatatttctgtaatcggaagggcatcttcaacaccatattggaatcaggtaaaggcaggggtagagcaggcagcaacggacttgaatacagcactgggctattcaggaaatgataaggtaaaagtattatacagtgcaccggatgagaatgataatatcgatcagcaggtgaatattctggatgaagagcttgcacgttatccggatgtgatcgcaatttccagtgtagatgcaagcgcatgctccgtccagtttgatcttgcgattgagaatggaattccgatcgtagcatttgattcgggaaacagctatcagaatatccaaagtacttgcaaaacgaataatatagaagcggtaacaacaggaacaaagaatttctgtgagaagatcggtgacagtggagaaattctgctgcttgtgcatgatacagtatcagatacggcgaaagagcgtgaggcagaaatcaaaaatgaacttgcagcaaatcatccgaatgtgactgttacagagacaatttatctggatcagctggaaatgttgaagaaacagattgtggctgaacaggtaggggtaacaccagaagaactggcagctgcagaagcaggagaaaagaaggaagagacaacaggaacaggtgatgcttccgagacaattgcagatgcagcattgaatgcggcttcttcatcagcagacgaaagtgcgaatgagacagcacaggaagcggacaatgaattgtccgagaagatgcagcaggtcaacgatggcgcggcaaagatgagtgatgaagatgcaattcaatattatatggagaaacatcctgatttaaagggatgtattgctacgaacgagacagtaacccagcttgcaattaggacgctggatcagtttgattcagaaaaacatattacattagtagggtttgatgcaggaaaagagcaggtcaatgcattgaaagatggaaaggtggatggacttattgtgcagaatccttttggaatgggatatgcgacagtagttgcagcggcacgtacagttcttgagattggaaatgaagctgaggtcaacacaggatatgtgtgggtgacagcagacaatatgaatgacgatacgataacaccgttcctttacgaataagttgaaaataaatcgaacaatttcataaaagaaaagagcttgtcaggcaaaagaaaaacatcaggattttattacttctatatttctgaatttcagaatgaagtataaaacctgatgttttctttgttttattcacgttgtcctttaagctttgcttaaagaaaaaataaattcggtgccaaccccttccgtactgattacattgatatgttcatcgtgagcctgtatgatttcttttacgatcgaaagtccaagtccggttcctttcttatcttttccacgggaaagatctgatttgtagaaacgctcccaaatcttattgatttcctttcttgagattccgattccatgatcctttacagaaacaaagactttgtcattttttgttgttacttctactgtaatagaagagtcattctcactgaatttgatcgcattatccagaagattataaagaacctgttggattttgcgtcggtcagccattacatcaatctgttcagacagtagaaagagcttaatggatatatgcttctgagtacagacaccctcgaaagactgggcagtatgtttgatcatctcctgaatatcaaaggaagttttattgagcaggagctcttttgtatcaaattcgttcaaagtaagaagatccgttgtcaggtcagtcagtcgttccgtttcgaagagaatgatatttaagtatttctcatgaagctctggtgggattgttccgtctgccattgcttctacataacccctgattgaagtcaacggagaacggaaatcgtgggatacatttgctacgatctttttctgataatcatcagaatccttcagttgtgcagccataaaattcagtgatgcggataaatatccgatctcatcatgcctgtttaccggaatctcgtaatccagattgcccatggcatattgcttcgcagcttctgtgatcagcaacaatggccgatggacgaagaaatggaacccaagcaggaagatgaaggacaacaggaaaataactccaagagaaatataaaccggaaccatcagcgtgcggcatctttcgttgatcagagagacagggatgtgaatgatcagatatccctttgtataaaatccctgtgtgacaggagccattacagtaatcatatcttcctgaaaataattatgataggttccgatcatgtactggttgctcccgatttcggccggatcaaaattattgactgattgtggtgcagtagtatccttcaggttggcagaggtgatcattgtaccatctttttcaacaaaccacagagaagaattaagatacgtcttcatagcagataactgagaatgaacagcccagctggaagattcgtttgaaaaataggaaggcagataattatctgcaatcatggttgcttctctgtataatgtctgtgaagtatctttttccagacgttcggtgatcagttctgtggtcaatgttgccgttgtgaaaacacacagaaacccgaaaataatataaagtacaataaattttaaatgcagaactgctttcataatttctccctaagtactcatcggtcaccagatgctgtttacagtatccaggatcgatgatttaaatctattttgtctcaaatttgtaaccaattccccatacagtactgatattccagtgagggtggtctttaattttttcacgcagacgtttaatatgaacatcaacggtacgagtgtctccgatatattcatagccccagatacggtctaagagctgctctcttgtgaatacctgattcggtgatgcagcaagacagtaaaggagttctaattcttttggcggcatatcaacaggatgtccgtcacaaacaacagagtagtttgtaaggttgattgtcaatccgtcaaactctgcacattttgttttttcaacagaagtatcattctgttgtccaacctgatatcttctcaagacagctcttacgcgggccaccatttccttagggtcaaatggcttcatgatataatcatctgctccgagttccagtccgagaactttgtcaaatacttcactttttgccgaaagcatgataatcggtgtggcagctttggaacgaatctcacgacaaacctgatacccgtcaattcctggaagcatcagatcaagaaggatcagatttggctgatagctgttaaaagctgcaagcgcatcttctccatcatatactaattttgtatcaaaacattcttttgtgagataaagagaaatcagttcagcgatattctcatcatcatctacgattaggattttctgttttccaaacattcttttttcccccattaaccatgataaggtagttgataactgtttaaaataattagccaagttctacaattgttacaccagcgtcaccttcaccgaattcggcaaggtgataggattttacatgtttctgacgacgcagatattcatgaattccctttctgagtgctccggttccctttccgtgaactacacggacagtattcaggtgagcgaggattgcgtcatccaggtatttatccagctcagcaacggcttcatcaacagtacgtccgagcagattgatctcaggtcggacagaaagagattttcccattttaattttgccttttgaagtacggttcattttcttcggtgcatacggagagacttcctcgataatctccagatcagagatgttgacctgggagctgaggattcccatacgtacggtaagattccctttggcatcaggtagagagcttacggttcctgtcaggttcatgctgagaactttaacggattctccgagcttgaagtcagatgctttatgctctttctttggtttctgtgctttcattgcagacgcagatgctgtatctttgatcttcttacgcagcttctcacgttccttttccatctctgcagcagaaatgttttccttgccgaatttacggaaatccttgatcgtcttgtcggcaacttcttttgcttcacgcagaatggcgtttgctttttcatttgcctcgcgtaaaatgcggtcgcgctgatcatctaatttctcctggcgctgtttcgcctgggctttcaggtcttccgcttctttcttcaatcgtgcgatttcttcctgttccttttcaatcgtccgtttgcttgtctcaagatcagtgagaagatcttcaaaggaaacgtcctgttcactgagccgtttctttgcatcttcaataatataatccggcagacctaacttcccggagatcgcaaatgcattacttttaccaggaataccgatcagcagacggtaagtcggacgaagactttctacatcgaattcacaacaggcattctccacacccggagtggaaagtgcatagacttttaactcgctgtagtgtgtggtagccattgtacggatacctctctggtgaagatgggacagaatagaaattgcaagtgcggcaccttccgtcggatctgtaccggctccaagttcatcaaagagaaccagcgaacgttcatctactttcttaaggaaagagacaatattggtcatatgagaagagaatgtactaaggctctgctcaatactctgttcatctccgatatctgcataaatctgatggaatacagccagttcactgcggtctccggcaggaatgtgaagtccggactgtcccatcagacagaataagccgaccgttttcaaagaaacagttttaccgccggtatttggtcctgtgatgatcagcagtgtgaagtcttccccaagtgtcacggtgatcggaacaacttttttcggatcgagcagtgggtgacgtccctcacggatacggatgcgtccctcttcattcagaagcggccggctggcgcgcatggatattgccagagcacctcgtgcaaaaatgaagtcaagatccgtcagagaacggtaatccacacggatttcctcgatatattgtgcggcttcttcacttagatttgcaagaatcacctgaatctcttcctgttcctttgcataaagttcttttaagtcattgttcagttttacgattgccataggttcaataaaaagagtagaacctgttgaagactgatcgtgaatgagtccctgtacctgtccacgatattccgctttgacaggtacacaatagcggtctccacgcatggtaatgattgcatcctgcagataagtgcgaagggaaccgttgaccagtgtagttaaagtggcgtgtactttgtcattgatgttattaatgcttcgacgaatctgcttcagtgtggaactggcatcatcactgtattcatcttcgccgataatacagcggtcgatttcatttgaaagtggtgtcagtggttcaagcaggttaaaatattcatccaggcagtcacaagcgtcctcttgtgtatcatgtcttccgtaggccttaaccctggctgcatttacaagcaggcgggaaatacggagaagttctgtgctgctgagtgagccgccaatctccagacgtttcatggactcttcaaccggtgcagcgtcaccaaacgagatacgtcccttttgcacgattcgtgtataagcggcagcagtctgttcctgataagtgttgatcttatgcaggtcggtcattggcttcaaacgacggcagagctgtcctccacggaaagatgtcgcttccttttcaagaagagcaatgatcttatcatattccagtttaaataatgttttttgattcatttatgttcctctgtcatttcaacttaatactaattttttaatcatgtagctgttcacaatacatgtgaacaataactatttccgagtcttattgtaccttattatttcattaaataaaaggcttttatagatattgaacaatctatatgaatcagttatactaagtaatggaaatgtccgtgtcggttgattttgtagttgacacggaagtgaacagtcacgaatgaggttcatgtcaatgtcagaaaagaaaagtaatggtcaggttccggaagagggtcctgacgggaaaaatttagaacagtcagaaaaaaaggaatcttttgcatttctcgaagagacgataaaaccaaagaagatcagcagacagcaaggaatgaaacagctcatccggattgcaatatgcggactggttttaggaggctctgcatgcctgggattctttgcattgcgcccgcttgcacagcatttatttcctgaaaagacacaagttgtgacaatccaggaggacgatcaatcagaggaagatttagcagaaggtggcgacacgacagagcagaatgacgtgcaggatcagcaggagatcagttatgtacagatgatgtccaaagcatatgagaaagcactgacagcgaagaagagtgtggtatctgttacgaaaggagcagaacaggagaactggaatgcagaagcgaccggaattgatgagagcgtatctggtgtgatcgttgcggataacggaccggagatactgattttgtcctatgcttcgatctgcgaagatgcaaaagagtggtgcgttacattttcagataaatcagaatataaggcaagcctgaaaaaaaaggataaaaatagtggatttgcaatatttgcggtagataaaaaaagcctttcagatgccacatggagtgcttcaagtgtagcatcacttggcaattcgaatctgacagaacagggtgatgttatattcgcactgggaaatattttcggttatgccggaggaagcggatacggaattgtcagttcgtcaaactataaagaaatcggacgcgacggagagtatagcgtgattgcgaccgatatgagcagtgcatccgaaggaacgggtattttattcaatctggatggagaagtgatcggaatgatttcttctgatatttggaaagaccggggagtacgtaccgcaaatgcttatgcgatctcagatctgaagttggttatccagctgttagcgaacggtgcaagtgtaccatatatcggtgtgtcaggaacagcagtgacaagtggaattcagaaagaagagggcatgccgtcaggaatctatgtgattgacgtggcagcagattcacctgcaatggcagcgggcatacagagtggagatgtgatctgttctgtgaatggagagaaaattgtaagcatgagtgcttaccgtaaactgatgttgacgctgaaagcaggagatcagatcaaagtggaagggaaacgccgaggatctgaaggatatgtagatattaaatttgatgttatgattgaaagtaaagaataataagtgaaagaggcagaaaatgagatttatagatggattatgcgagggagaaacaatcaggaatgtatatctttgtaaaggaaagcgttccgcagagacaagaaatggaaagccgtatgataatctgattcttcaggataagacaggaacattagatggaaaagtatgggatccgaactcccagggaatcgcagattatgatgagaaggactttattgaagtttttggagatgtgatcaattataacggaaatcttcagttgaacatccgtcagatcagaaaggcggaagagggagaatacaatccggcagattatatgccgacaacagagaaaagtgttgatggaatgtacgaggagctgacagcttatattcgtcagatctctaacaaatatttaagacaggtgttggaattctactatataaaagatgaagcatttatcaaaaaattcaaggcacattccgcagcgaagacagtacatcacggattttccgggggattgcttgaacatacactcagtgtaactcgtatgtgtgattattttgcaacaagctactctattttgaacagagatctgctccttagctctgcaattcttcatgatattggaaaagtgaaagaactttctgattttccggacaatgattatacagatgagggacagctgatcggacatatcgtgatcggtgttgagatgatcaatgatgcaatccgttccattccaggatttccggagaagcttgcacatgagctaaagcattgtatcgtggcacatcacggtgaactggaatacggttctccaaagaagcctgcactggcagaggcagttgcactgaacatggcagattcaacagatgcaaagcttcagacattgacagagctgttcaaaggaaaaacaggaacagactggcttggatataatcgtctgttcgagtctaacttaagaagagcatctgaggattaaatttaacaatgagaataacaagtgtcactgtttgcagattctatgtgagcagtggctatttgtataattaagagtaaaatagaagagagaaaagtatgaataagaatgatattgtaacagttgaaataacagatatcggagtgagcggggaaggaattggccatgtggatggttacacgctctttatcaaagacgcagtgatcggtgatgtggttgaagcgaaagtcatgaaggcaaagaagaattatggctatgccagattaatgaaagtcatcacaccgtcagaatatcgcgtagaaccaaagtgtgcatttgccagaagatgcggaggctgccagattcaggaaatgtcttatgatcgtcagcttgtgtttaaagatcagaagatccgcggaaatttggaacgaattggtggctttacaaaagagcagattgaagctgtgatgcagccggttgttggaatggagcatccgtttagttatcgtaataaagcacagtttccatttggaacagacaaagaaggcaatccgatcacggggttctatgccggaagaacacatgatattattgcaaacacagattgcgctcttggcgtagatcagaaccgagaaatactcgagattattttacaatatatgcgtgaaaacaagatcaaatcgtatgacgagaagactggaaaaggtctgatccggcatgcattgatccgctatggcttcaagacaaaagagattatggtctgccttgtggtcaacggaaagaaacttccgaaagcagagcggctgattgaaaagcttattcagattgaaggcatgacaagtatcacgatcagcccgaatacacgaagagataatgtgatcatgggagattcctatgaaattctctggggacagggatatattacagattatatcggaaatgtaaaatatcagatttctccattatcattctaccaggtgaatccggtacagacagagaaactatacggacttgcacttgagtatgcagacctcaaaggtgatgaaaccgtgtgggatctgtactgcggaatcggaacgatttccctcttccttgctcagaaggcaaaacaggtttacggagttgagatcgtgccacaggcaatcgatgatgccaaagaaaatgcaaagatcaatgcgattgataacgcagaatttttcgttgggaaggcagaagaagttctgccggaatattatgcagagtatgagcgagagcataatggtgagacagctcatgcagacgtgatcgtagtggatccaccgagaaagggttgtgacgagacactgctggagacgatcgtgaagatgcagccggagaaggttgtgtatgtaagctgtgacagtgcgacattggcgagagatctgaagtatctgtgtgcgaatgggtatgagattacggtgtgcagaggggtggatcagttcccacagagtgtgcatgtggaaagtatcgtgttgctttccaaacttaaatcaaataagttgaagcatatcaatgtggaattagagatggatgagcttgatttgatggcggcggagagtaaagcgacctatgaggaagtcaaggattatgtttctaaagcaaagcggattgaaagttagcaacttgtatatcgcacaggtgaagcagaaatgcggcattattgagagggcaaattataacctgtcaaaattggaaaactctagacagccgaagtgtccgccagggaaagaagcggctataagggaggcactggaacattttcggatgatatgacgatatcgtagaaataggagaatcctttttctttgacttggttctttaagtccctttgttagttttggttagtgggacataattttacatttgaagaaacgtgaatacgtatcggaagatagatagagagttcaaacagatacgaaggagttttgttcataaatgatagaaaaaaataagattttagaatcatggataatggtggaacatttatcggagggagacatcggtttgaatgataaggctattctcactctgaatgatttgcaggaacaggatttctattctctgtttctgcataaaattgagaaaaagaaatggaatcgacggcaaaaaggaggagtcgttgtctattttgatatttttaaatttcaggaagttgtggacatacttcatgcagagtatggtttggaagcgacggatgaggatattcgtttcggagacaagttcagttttgcgctgtatttcgataagaatcttaattttctggaggatatgacattctttacagaaagtgcttacatacggaaattcaaaaaagttccctatgagaaagagtttcgggaatttgagaaagattttaaaaatcagcttgctcaggattttgatgagacagcaggggattcggcgaagtttaatgctgcgatgcaaaaggaactcctgcgacatgaggttaatataataaattgccggatgaagattttgggaaatatcgagactgaagcgacgaatctgcattcttttttcatcgatgatctggaaaaagcaaaaaaaatcgaaacggttaatttgaatgcttatttgtatggaaataaaaaggaacgcatgaaccttgacagcaaaaaagattcagtgaattttcatccgcatctgtttgaacaaattctgcagccgaagaattatcccctgggaaggtttccaagcaatacgacatatgcgctttctctgatgcagcaagttgcggtaaacttatccatcggctttgacaacaatcagatgagaagtgtcaacggtccgcctggaaccggaaaaacgacgcttttgaaggacatatttgcgcagttagtggtacagcaggcgtatagtattgcgaaactttcggaccattttatcaaaggaacagagaaaacaatttattttaatcatgcatcgattggagagatcccggaacatattatcgaaaataatatcgtggttgcaagttcgaataatggtgcggttcaaaatattgtgaacgaacttccgttgagtaaggagattgacaattttctaatcaatgaactgaaagaagcggactatttttgtgagatatcgaatgcgaaggtgtcggtagagtggctggaagatgagaacgggaagaaaagagaggaactggtaaaagaatctgttccgggagaagaaaagttttggggagtattttcacttgaaggtggaaaagcgaataatatgagcaatatcctcacgaacatgaagcatatccacaaatatttggaagaagattatctgccgaatcaaggtatatataaacaatttctgagtcattatgaggaagtaaaagcgattcgaacaaaaaggcaggaatttgcagatagcgttcggatgtatcaggaatatactcaaaagatggaacaggttcgtggcagctatcaagaaaaattagagaagaaagagcatgaattgtgcgtagaacttaagaagcttgcagaaaataaacaggaatgcgggcagcagttggaacagttacatctcagtttgaaagaggtacaaaacagggcagaagctgtccgaaaaaatatggacagtatgaaccagtgccttcaagtacacaaggagcaacgtccttgcttctttgcgggaaagaaaaagaaagaggaatataggagcagattaaatgagattacggatcagttagtaaaattaaatgatgaagatatagaatgcagggaacaggagaaaaaaattaatgaaaatattcatttgcggcaaacaaggctgagtaaaagtaatgaaaaacaggagaagcttaagcaggagtttaacagttggaagacggtggaaacaggtaaaatttcaaatttggagaaaagagtccgcgaatatgaaaatataaaaaacgacagtaagacagaaccgctgaatatgaatcaggagtatgaagatttacagatatcaaacccgtggtttgacgaagcgtatcgtgtcgcacagtcaaaattgtttgttatggcattacgtattcgaaaacaatttctttatgagaacagaaaaaatgtaaaggcggccattatcgtctgggatcagcaggagaagtatttggatcgaaagcatgtgattgaggcggcatggaactggattaatatgacaattccggtgattagttctacgtttgccagtttttcgcgtatgtgcaaaaatcttggagctgagacactggggcatctttttatcgatgaagcaggacaggcgctgccacaggcggctgtcggtgcaatctatcgcagcaggcatgtaatggtggtcggtgatccgttgcagattaaaccggttcttacgttggattctaataccctatatatgttgggggagcattttggagtgacagaaaaatatttatctgcatctgcatccgcacagattttagcagatgcggcaagtcaatacgggttttatcgaaaacaggacaaggcggaggattcatgggttggaattccgctatgggtgcatagaagatgtcggtatccgatgtttacaatttcgaacatgatttcctatgacggatttatggtgcagggaatggaaaagtacggaaaaacagactggtttgatgttggtggaacggcgaacaataaatatgtcgaggaacagggagaattccttttgcataagctcaaggagatgatagataaaaatccgaaaatcttagataaaaaagaaaaagatgtggtttatgtaattacaccgttttccaatgtggcatatcagctttctcagaaattacggaaaattcactttacccgatatgatgaacagggaaaaccgacaaatgtcggaactgtccatacgtttcaggggaaagaggctccaatcgtattttttgtactcggtgccgacaggcagagcagcggggcggcacgctgggcagtaaccgaagcgaacataatgaatgttgcggcgacgagggccaaagaggagttttatattattagtgataagaaattgtatcttgggcttggatgtgatgttgcaacagatacagatcggattatcagagaatataaaaatcagtatcttgtggatgatcatgcacacaagaatgagttgcgcatgcaggatgacgagacacggacactcattattgatgcggattttagacgcattacaggaacggttaaatatgttggaaagggaacagaaagtttttatgcctatgtagttggtgctgatggaaaagaatattccattaccgaaagtatttattctaagacagagagtgcaatagaagtgattcaaaagggtaaaaaaatatcttttattccaagagaagggaataagaaactatttgctacagaggtgaagatagatgtttaattaagagagaggttatcgggaatttaatggaacggtaaagggagggggaaaagatggaggatcaaagagacaatcctaatattattgggagtgaaatcatcatatatcaaacggaagatggatatacaaaaattgacgttaaatttgaagacgagaccgtttggcttacacaggcacaattatgtgagttgtatcagacaagtaaatctaatatcagcgagcatatcaagcatatttttgaagaggaagaattggatgaagagtcagttgttcggaaattccgaacaactgcagctgatggaaaaaactataatacaattcattataatcttgatatgattatttctcttgggtatagagtgaaatccaagattgctacaaatttccgtcggtgggctgctgaacgattaaaagagtacatgataaaaggctttacaatggatgatgaacggctaaaaaatctgggtgggggtaattattggaaagagttattagaccgtattcgggatattcgctcatctgaaaaagtgatgtaccgacaggtacttgacctttatgcaacaagtgttgattatgatcccaagagtagtgaatccattgcattttttaaaatggtacaaaataaattacactatgcagcacatggacatacagcagcagaagttatatacgagcgtgcggacgccagtcagccttttatgggattaaaaagtttttctggtgattttcctgtattgaaagatatcagtattgccaaaaaatatctcaatgatgaagagttaaagatcctaaataatattgtatcgggatattttgattttgcggagattcaagctatgcgtcacaatcccatgcatatggaagattatgtggaacaccttgataatgttttgaaaactacagatgaaaaagtgttgcaaggagccggaacgattagtcatgcacaggcaattgaaaaagcaacagaagaatatcggaaatatcaggtgcagaacttatcgccggttgaagaagaatatttggaaagcattaaaaatattcacagtacagtaaagaaaaacagtaagaattaattttcataaaagagatttttagaagttggtaaaaatacgagtttggacaatgatgagtatgtcgagacggtctgtttgctgtcaagaaaataaaatcaagtactgaaaagtagcgtatttccgagctttttgtaaggttggtatcatcagagaagccttgcggaaagctcggttttattatatggaaacatatctattttttggtctgattggagaaaaagtggatggccggaaaattgcggtagggtttaggctgtggattagatgttagcttttccggatttggttcattgtaaatcagtcgatacagcggatgtttgatagttttttccttgccactggtaccggtgtattgatatacatggactggcagaccagcaatagattcagaaagaatcccataggtcatcacttccttttaaaaatgggtataagaaaagcacctctgaagagatgctttcttaaaaatttcttttttattctgaaatcaaccaatcaatcaagttgatgggtttaataccatcataggaagaatccattccggtatttaaggatagaattattttttcgtagttatcgctgattttctggagtggtggtaattctcgcttgcgaacatctttgctggtcatggtctctgtgacctgaacataaagtttgtcatctacttttgttgcgataaaatccacttcggaattatccactttaccaatagagacatcatagcctctacgtagcagttcaaagtaaacaacattttctattgcatgtccgctatcacgatccctgaatccaagcagatagtttctaagtccgatatcaacaatgtaatactttccaagagtacgtaagaattcctttcctttaatattaaatctcttgatgtcatagaagaagtatgcttccagtagcgcattcacataggcctgaacagtgtgagcgcttggagttcatagtgttcgccggttttatcaaatgcttgcctgcgtgtgccacctaacgcacttttggtttctcttatttcaaaatcatggaatgttataatcttattcaagtttatgcactgaaatgcagaaactattaaaatttgacaatttttgcattttacaagaagagaatgcctctatcatcgtagacagaagcaccggtattatttccacagcggatagcacggtcgagctcatgatggggagattatttgatgaattatgtgctaatattctgcaattctactgctggtcgattgatttatgcacactctcattataatatgtgtgcaggaggtggatatatgtatcagattagtaatgaaaaatttggtttatttgtaaccgaattaagaaaggaaaagaatttaactcaaaaggatttggctgaaaaattatatgtatcagataaaacagttagcaaatgggaacgtggtcttagtatgcccaatgtcgtattactcataccaatagctgatatattagatgtcaccgttacagaattgttacgtggagaaaaaatagatacacagaaaaatattgaaaaaaaagaaatcgaggaattggtagtaggctctctcgatatggctgttagggattctattcaccagcatagaaaaaactggatattagcatatttgttatgtttttttatatctattacagaaattattatgttagttgtatctggaagttcattagctgagatgaaaagggatatattgctagttaccgggggaatgcttttatttggtgcatggttttgtttctttgcaaaagacatattaccaacatattatgatgccaacaagataaattatgtttcacaaggaatttttagaatacatctagttggtttatcttttaacaatggaaattggatatacatctgcacaactttaaaaatatggacacttgcaacggttgttctatatcctcttgcaggtattataataatcaattgtttcaatatagctttatgggatcttttgaataaaattttcttaattatgatattaggtggtatggtagtttcgatttacattatcgggaaaaaatacgaataattaaattacctgttatcgttgtggatagtactaatttacaacattcttcatgggaaatatggaatgatgcagaagaggttgtgttaagagaattagtgtacatttaaaacgtggaaagctccttcgggagctttttgctgtttataagttaatttctgccagagattttgatttaatgatttgatttataaaactggcaatgatacaattagcgtaatttgaaagaaagcagagaaaatatgagtgaaaacttactgattgttgaagatgacaaaaaattaaatgatggaatacgtttcgcattgaagaatgattcctatctcttttatcagtgccagactttgcaggaggctagagaaatcttgaaaaaggaagatatcacattggttttattagatgtgaacttgccggatgggaatgggattgattttgtaagagaaataaggaaaaatagtcaggtgccgattattctgcttacagtaaataacatggaagtagatattgtaacaggattggacgctggggcaaatgattatattacgaaaccgtttagtttgatggttttgcgtgcaagagtgtctgtgcagcttagaaataaagaggcagcagctaaaaattctatggagcttgatggctttgagttctatttcgataaaatggaatttttcaaaaatggagagcttattgaactgagtaagacagaacaaaaactcttgaaagtgctgtgcgaaaacagaggaaaagtagtgaagcgagaatacctgattgacgaggtatggcagggagatacagagtttgtggatgctcatgctctgactgttgcagttaaacgtctcagagacaaattagaagatgatacgcagaagcctaaatatatcaaaacggtttatggaattggttatacctgggcggtgaatggatgatagaaataattatattgattgtaggaatatttgttttaagtggaatcttctggcatagcattttttatcagaaagaaaaaaagcttttgaaccggctgcagcaaatgctggattgtgctatagatggagaactggaacggacagaaatatcagaagaaaagtattctgctcttgaaaacagcatgaaacaacatttagacagtagctttctggcaagaaagaaccaacaggaacaaaaagaagtgatacagaaacttatttccgacattgcgcatcagactttgacgcctatttcaaatttgaaaatttatggtgaaatactctctgaaacgaatcatgaaaatcaggaggagatagctaccattttggagcagacagagaaattagatttcctgatacaatcattggtcaaattatcacggatggagagtggaattatcgcagtacattcggaggatactactattacacagatgcttgaatccatacagcagcagtttaacgtaaaagtaagggagaagaatattactctgagcctatgtgacacggatttgcatgttctatgtgatccaaaatggaccgtggaggcactcggaaatattgtagataatgcgattaaatacacagcatgtgggggaaatgttcaggtaaaaactgagcagtattctttttttgtaaagattgatatcattgatgatggcattggaatagaaaaagaagaaataccaaagatatttggaaggttttatcggagcctgtcagtggcagaccagccaggagtaggaattggcttattccttacaagagagattattcaggcacaaaaggggtatataaaagtgacatcagagagagaaaagggttctaccttttctgtgtttctcccgatatcaaaaaaggaatagtatcaaaactgtgatctttcagaaaccagatggagacattgttatgataaagtctgtattgtaaagagcaatacaggcttttttgatgggaggatggcatgaatatattaaaagcggtagatttacaaaaaatatatggacaaggagaaacagaagtcaaagcccttgatggtgtaaatttagaagtggaaaagggggagtttgtagcgattgttggaacttccgggagcggaaagtctacgatgcttcatatcattggaggattagataatccaacatctgggcaggtaattgtggatggacagaacttaagccatatgacagatgaagagcttaccgttttccgacgcaggaatattggtttcgtatttcaacagtataacttagttccgatgctgaatgtatgggaaaatattattcttcctgtgaagctggatggaaaaaagattgaaaagaaatatgtagacgaaatcattgatacacttggtattcggacaaaattggaaaatctgccaagtgctctatccggtggacagcagcagagagtggcaattgcaagggctttagctgcaaaacctgctattttgctcgctgacgaaccgaccggaaatttggattcaaaaacaagtcaggacgtattagggcttctgaaagtaacaagtaagcgttttcaccaaaccatcgttatgattacccataatgaagagattgcccagatggcagaccggattttacagatagaagatggaaaaattgtttcagacagtggtctggtatagcagggggcgattttatggtaaaagtagagaataaagagacgttacgattattaacgaggcgttttatgaaaatgaatcgcgccaggaatgttattgctgttattgcaatcatgctgacttcccttttattcacaagtctctttgtggggagtgtatccatgatactttccaaaagagcaacggaaattaagcaatttatggattcatcccatgctattgcgcagaatttgtcagaagaagatgcggagagattgcaaaaaacaatagaacaggatgaagatgtggaacgatatggttccggtatttttctgggagctggaatggacgaacggtttggattttccgtagaggtccgatatgcagatgaaaatatggcagaaagttttaattgtctgccaactacaggaagactgccggagaaagaaaatgaagtagcacttagcagcacgatattggaatctctgggtgttacaccaaagattggggaagaagtaacgctgacctgggaagtaaatcccatgctgaaacaatataagacagatacgtttcagatatgtggattctggcagggggataaagctgttttaggtcagatggtctgggtatccgaagcctatgcaaaggagaatcgttatcccgttacgcagaaagagttagaaaatggcatctacaatggagggaaagagtattctgtctggtacaagaacctttggaatctggaaaagaaaacggaaaagatatccaaagcagcgggatttacgaaagctgggacaggaatggaagtcaatccggcatataatctctttgaagaggattctttttcattttcttctttaattataatgattctatttgtcatattagctggatacctgattatttataatatttttaacatttctgtgaaaacggatatccgggcttacggattgttaaagaatgtggggacaacgggaaagcagttgaagaaaattgtacgtatgcaggcgtggagattatcagctattggtattccaatcggattgctttgtggttatcttgcaggtctttgcatggctccgtccttgacagcagatgctgaaattagtgcgcaggcaggacagactgctcaggcagtagtatcagcaaatcctctgatttttcttgcagcagcgcttttaacgcttttaacggtgtatctctccagtctgtaggcttgtaaaatggtggaaagagtttcgcctgtggaagctctgcgtttggctgaaggagaacaggcacataggaaaataaaaaagaatacttctgtaacctggtgggggatggcagttcaaaatgtgttacgaaattggaaaaagggattgattgttatgctttctatcgccctttctatggtggttgtcaactgtatcgtgatgctggtgcagggatatgattttgattcttaccgaaaagtgcgtttagcttccgattttcaactggatcagatgacgggaagtttgtcaaatacgaatttcaacggtattacacctgaaatcaaagagattctggacgaatgtcctgatagtgctaagacaggatatgtgtattattctgaggaaacccacaagatggagccggaacttctgaaaacatgggaagcattcgcagataaatatgaaaaaaactggaccgattatgaagaacaggtttggaaagatgcaaaggcttccaatacagtaagtgttcattttctcggaatcagcgagtcagtgtttgacaaattagaatggagaggggaaaaatgctcttgggatacatttaaaagcggaaattatgtgcttgtagattatggtgataaatatgcagagcatccggtttcttattatcagactggggatagttttcagatggattacaaaaatggaaaccaaaaagattatgaagtcatcggagaagcactgatgccatatgcattggattatccgtatgcggactgtatctatatcacggtattggttcccgaagaggagtatatcacccagacaggaaataaatcagccatgtatgctgccattgatgcaaagaagggcgaggacaagcagataaaagaatacattgataaaaatattttgaaagaaaatgatatgatcaatgtgttttctgtattggatatgaaagagagttttcagcggtatgtcagcaaatattatatgatcggtagttttcttgtcattattttagcttttattggcattatgaatttctttaatacaacagcaacctctgtaattagcagaaaaaaagaactggcacttttggaagttgtgggaatgacgaaaaaacaggtatcgaaaatgctagtggctgagggattcctatatttgggaggtgcatttgtgattgcagtattattagttgtgtttggggcagagaagattttagcaaatacacttggtacggcatttttcttccggatgcatcttacgatagtaccgtgtgtgcttatgattccaattttggttgggattgcgtatgtgataccaaagtatcagtttgaaaagatgagtcgggaaagcattgttgaaaggattcggaaagaataataacaatatgtaaattaggcgtatggatttgatgaatccatgcgcctttttagaaaaatataaataaaaacaaaagaatcctaacttttttaatagtaggattgttatattatttagaaaacagagggaggcaaatttgcgaatggaatacaaaacagattctttgttagtacatctagcaagagcaggagatgaagatgcgtgtgaaaaactggtcaaaaaatattactcaagtatatatcaatattgtttgctacatacctatgattcctatgaggcagaggatttgacccaagaagtatttacatgtttcttttctaatttatatagatataaagaatatggaaaagttaagaattatctttatacaattgccggaaataccgttaaaaattattacaaaaagaaaaaagatattccatcagaggaactgctaaaatcagaggacagtggtaaaaatcatgtagaagagctaggagtccgattaactattgaacaggcagtgagaaagttaccggaagaaattagagaaacggcagttttatatttttttcaagaattaaaacaaagagaaattgcagaattacttcatatcaaactttctcttgtaaaatatcgaattggaagagcaaaagaacttttaatgaaagagttggaggtgaaaaactatgatgaaatataagcaacaaataaaggaatataaagaggagattgaagaaaaatatgtaaggattgaagcagaaaacagaacagtaaaagcatgtcaaaatattttggcagagtcggttttatcgaaacaatcacatagaacatcttattttgaatttttgtatgagcagacaaaattcataaaaaaaagatggtggattttacaaggttgtattcttatgtgtctatggatatggttgagtaattatacgtcagacataaaagatatgatgaggattatgggaatatctgccacaatatttgtggttctgattgtcccggaaatttggaaaaacagaagaaatggtgcgattgaaattgagcaggcgtcttattacacactgcgtcagatttgtacagcaagaatgttaatgtttggagtagtggatctagtgatcgttatggtgtttttggcaattacatatcaaacaacaatactctcgttaagtgatttggtggttaattttttgcttccagtaaatgtttcatgttgtatatgttttcgtgtattgtacagcagatgggaaaaatcagaatatatagcagtgctttcctgtctagtatgggttggtttatggatgatgattgttgcaaatgatgttatttatcagaaaattgtaactccggtatgggtggctatgctgatattgacttttgtatattttattttttgtgttcagaagtcattggtatttgatgaaaaaattttggaggaatacatgtatgaaattagaaattaaaaatgtaacaaaacaatacggagaagtaaatgctgtcaataaagtgaattgtgttatgaaaaaaggaatttatggactgcttggagtaaatggagcaggaaagaccacattaatgcgtatgctttgtacgattgttcaaccatcagcaggacaaatattatggaatggtaaagatatatggaaactaggaggtgaataccgagaagttctgggatatttaccacaggattttggatattatccagatttgaccgtatatgattatatgatgtacatttcttctataaaagggttaaaaatgccgtttgccagaaaaaaagtgaagcaattattaaatcaagtaggaatggaaaaatttagtaaaagaaaaatgaagaatttgtctggaggaatggttagacgtgtaggaatagcacaggcgatgttaaacgatccgcaaattcttgtcctggacgaacctaccgctggattagacccgaatgaaagaatacgtttccgtaatttaattagtgaattgtcggaagaacgtttggtgctcttgtctacacatattgtatcggatattgagtacattgcgaataacattatgttaatgaaagatggagaacttttttatgcaggtactgcggaagatttagtatcttctatgaaagaaaaggtatggcaatgtaatgtttcgagaagtatgatagacaaatatatgaatgaatatttggttggaaatataaaaacaacaaaaaccggagcagagcttagaattatttcaatagaaaagccaacagaagatgctgtggctgtagaaaaaaaactggaagatgcatttctattttattttggagaaaaatcggaggaaaaacaagatgcttaaattagaattaaaacgaattttttcaaagaaaattaatgtatttgcaatcggattggcattgatacttgctgtcatttttagcggatttgcagttacaagtaatcgctatgtggatgagaatggaaatgctagcactggaattatggcaacaagaaaacttacagataacagacgagcatggaaaggtacattgacagaagatgaacttggaaaagttatagaacaaaataaaaatgcggtgacacaatcctcagaagaagaaaatgcgatttacggaacgacattacaaccgatagatgatattaggagttttataatatcggtattaacaccggatgcagaatatgatgaaagtgttctgaatcaaattacagaagaaaatatacaagagttctatgacacttatcataaaaatatggaaaagatggcagaagaatatggaaagactgctgttcagaaaaaatacttggaaaagaaatataatgaaataaaattaccagtagaatacgaatcttatagttcatgggatacgatgattatgtatgtagaaacgtattctattattctggcaatcatagttggttttatttgtgctggaatatttgcagatgattttcagacaaaagcagatgcagtatttttctctacaaagtatggacgtacaaaagctgttaaaacaaaaatactggcaggaatagttacgacggttatgatttattgtatgggaattatattacttagtgtgatttgttttggaattatgggaaccagtggtatgaatacaccctatcaaatgtatcaggcatatagtatttacattatgtcatatggacaatactatttgttgacagttgtatgtggatttatagccagtatgctggcggcttcagtgtctatgttagtagcggctaaaatgcatacaattagtgtcgctgtttgcattccgttctttttatattgcttatttccatttataggacgggcactttctgtgtatacaacgcttttcaatttaataccaacaattttgacaaatgtacaggcaagtgtaaaagtcccacttatttatcagattgggaattgtgtatttcgacaaattccgcttgtaatggtaatgtatacagtgatggcaatagccttactgccttttatttataaaagttttcgcagatatggaaataggtaaaaattgtatttattttgttaaaagacaggatagagtttttctgatggaaaatccaatctgtggatataacttctgaatttcctgtactttggcataatccagacagtcatcggaatggtatagcttcccccgagtactcttcaagctaaagtagaaatagtgcaattttcacatgatattatacaagaatcacatagaaatatatcgtattattgatagggtagtcttgaattgtatgtgaggagaaaaacatggaagctaaaagaaaaacattaacacagctatctgtgccaatatgcttagaaactttattttacatgctttccggtatggtcgatacgcttatgctatcatctgtaagtgatcaggctgtaggagcagtgggaacagccaatacatatataggcgtttttattattatgtttggagtaatatcatcgggtatgatagctgtcatgtcacaaaatattggagctggaagaccggggattgcatatcaggcaagacaacttggacttatattcaacgcattgataggtatcgtaatgtctgtcgttcttgctactttttctggtgggatacttagaatcgtaagtattgctccggctttgcttgagccggctgaaatatatcttagaattgttggcggcacatgttttttaaatgcactgattcctattttctccagttatttgagagtgtttggatatacaaaacattctttgataggaactgttgttggaaatgttctcaatataatacttaattcagtatttttatttgcattcaactggggtgtgatgggagttgctgttgccacggttatttcgagagttgtaaatcttattattgtagccggcatgggggctgtacttataaaagcaaagcagagtcctgagcgaattacatcaagaaagatatttgcacagattgttaagattggttttccttctgcgcttgaaacagcactttacaacatcgcaatgacatttatagtgcgttttatgaatcagatggatgcggatggaatgaatgttacagcgcgttcatatgcgatacagattgcaaatttctcgtattgcgtgggagctgcccttgctcaggcaaatgcaattatgaccggctggagaattggagcaaaagagtttgaggaatgtaacagggggacgagaaaagctgcgatatatggtatcatcacagcgacatgcttttccgtgacctttgcatttgccggacattttatcgtgcatatatttacggatgatatacagatgataaatcttgtggtaaagttgttaatagtagatatatttcttgaatttggaagggtaacaaaccttgtatatggtcaggcattaaaaacgagtggagatgcagttttcccggttatgctaggtgcgatatttatgtatttatttgcagttggcggaacgtattttctcggaatacacatgggacttctagctgtgggagcatatattgctatggcaggtgacgaatgtgcgagagctgtgggaatggtacttagatggaagagtggaaaatggaagagtaaaagtcttgtagaattatctgatatgtcgtaaatcctctgtttcgcctgtagggaatattaaaggagagattatgtactttgaattaaaagaaaataaaccacacggtacaaaggatgatccgtttagtacatatcatataaaaaatgggggacgatcatttcagataccggtacattggcatgatgaactggaaattatatatgtaaaaagtggttttttgactgtaagtatatcaggagaaaactatattggaacctccggggatgcttttgtagtgtcgccgggtaatctgcatttcatgggttcacagactggtacagtagattattttactttcctttttccggtagaatacatatctttttgcataaatgatatgttagatgataaattactgaagccgttaaaaaatggtcatctgatgataggcccaagagtaaaagatacagcaaaagaactgtgtgagcagttggttgagacatatatggcaaaaaataagaaaattgagtccgaaataactgctcagataaagacaaaaagaattcttttacaatttattcttgaaatgtgggagaagggctttgtgatcgaaaatgataaaagcgggagaaatactgtagaaaaagaaatgatttcatatatacagcagaattttaaagaaaagatatcgttgaaagaatttggtgagctgtttcatctttcggaaaaatatatatcgcgatactttaaggaacactttcatattacactttcgcaatatataacacatttacgattagagtatgcaaaacagctgttacaagatacggatactcctgttacagagatcgcaatgcagagtggatatcagaatgtaagctattttatcagaatcttcaaaaaaacatatggagtttctccgttaaaatatagaaaaaaataagccaggtatatggttagaaaggagaggatatcccggtagaatcagaaaatctgccggagagatatcgaaattgggtatggaaaataagaataaatggtggaaaaatgcagttgtatatcagatttatccgaaaagctttcaagattcggacggagatggaataggtgatattccaggaattatcagcagactggattatttgaaaaaacttggaatagatgcaatctggctctcaccggtgtatcgttctccacaggatgacaatggatatgatatttctgattatcaggatattgagccgatgttcggaacaatggaagatatggaacagttatttgcggaggcaaagaaacgcggaatccgaattatgatggatcttgtattgaatcatacttctgatgaacacagatggtttctggaagcaaagaaaagtaaagacaatccgtatcatgattattatgtgtggcgtgacggagaagaagacgtttatccaaacgatatgaattctgtattcggcggaccggcatgggagtgggttccagaactgggacagtattattttcatcaattttcagtaaaacagccggatctgaactgggagaatccgaaagtgagaagagagctctatgatatgattctctggtggatggaaaaaggggcaggcggatttcgtctggatgtaattgatcagattgcaaaagagccagatcttaagatcacaaataatggaccaaagttgcatgaatttctgtgtgaattaagcagggaaacatttcagaagggcgacatgatcactgtaggagaagcctggggagcaacaccggaaattgcaaagaaatatagtaatccggatggaagtgaattttccatggttttccagtttgagcacattatgcttgatcaggaagaaggaaaggaaaaatgggatacgattccattgaatctggtaaagctgaaaaaatgccttgcaaagtggcagaatactttatatcaggtaggatggaacagtctgttcatgaataaccatgatcttcccagaatcgtgtcgcgctggggaaatgacggaaaatacagaaaagagtcggcaaaaatgctggcgacaatgcttcatggaatgcagggaactccttacatttatcagggagaagagctgggaatgacgaatgtgcagtttgacagcattgaagaatatgaagatattgagacattgaacatgtacaaagagcgactgaaaaaaggatatcagccagaagaaatcatgcagtctatctacgcaagaagccgtgataatgcccgtactccgatgcagtggagcggggatgagaacggaggattcacaacaggagaaccatggtttgccgtgaatccaaattataccagaatcaatgccaaagaggcactggaagatgaaaattcggtattttactattatcagaagctgattcgtttaagaaaagaaaatccagtattcgtgaatggaaaatttgaacttcttctgccggaagatgagagaattttcgcctatacgagaacagatgagcatacaaagatgctggtatgtacaaactttacggatgaggaagttggcttcccattacttgatgagtggaaagccggggaagtctggattcggaattatgaggacgacagagaaggaaatatattgcgtccttatgaggcggtgataattgcatttactggcaaatagattgagttttttggggggcatcaaaattcacttactagcataagtgatagtgaaattatgtggatttcaacttattataagtgtaagataataactattgaaaccgccgtgtaccgaatggtacgcacggtggtgtgagaggacgggagctaatcactcccgcctactcgattatttattttacagtagcattttaaaatatgtgataaaggcggatttgcatatcttaccagtattatggatctatatttcagaaaaatcatttcctgggtactaagtgagtcgttggaggcatctcatgtagtaaaatgttcggtttttacaacagtctgtttcgtgtgtaattcaattttaggtgtaactacccaaggcaaattgtagcaaagacgataggaaagtgtgggggatttcgcctgtgtcatgacacaggcagtgcttgctattttagcctgaccagtcatccagcggcaaaccagaccgttgtccattgaaaaaacctgatttgctggatcatccataaaatcttcaaataattcgtataaaaaatcaggctgactcatttgattactttcgttgaaaacagaataaagaagaaaaagaagcggcagttttctgaaatacaaaatgtaaatcagactgtcgctttttgagaaattattcggctgtgttatcttttgcttctgcaagcatataaggatcgcatttatctttacgcttaaatataatataatctaagcataaaagtaaatatcaaggataatgaggacaatttcaaaggcagatttaaactggatggataaaaagtccagaagcagtgtggagatgagtgacaaaaagttcagaccagaaatatccgacacagatgtttcggttgagcagtatgatgagatcatcttagggtttccgatttggtggtatgtagcacctacaattatgaatacatttttggaaagctataatttttcaggcaaaaagattgtgttgtttgcaacctctggtggaagcggatttggaaataccgtaagtgagcttaaactgtcagcacctggtgcagtgataatagaaggtaaagtatttcataaagctgaaaagcgggaaattgcagagtgggtaagaagtattttgtaaggaaggtgaataaaatgaagaagattatacagacagccgggagaaacgcacttactgatttttcaccggaatttgcacattttaatgatgatattcttttcggtgagaactggaataatcaggatattgaccttaaaaccagaagtattataacggtagttgcactaatgtcttccgggataacagatgcctctttaatctatcatttacagaacgcaaaggcacatggtgtgacacaaaaggaaattgcagcaattatcactcacgttgctttttatgtcggctggccaaaaggctgggcagtttttcatctggcaaaggaggtatggcagccagaagaaggagacttgccatatgaagatgcggctatgagagcacatgcgaaatcaatgttttttccaattggacagccaaatgatgcatttgcagaatattttgtaggacaaagttatctggctccgatatccacagatcagattggaattttcaatgtaacctttgagcccggatgcagaaataactggcatattcatcatgcaaaaaacggcggcggacagattttagtatgtgttgccggacgtggattttatcaggaggaaggcaaagaagcggtagaaatgaaaccgggtgactgtataaacattccggcagaagtaaaacactggcatggagcggctccagatgagtggttttcccatctggcaattgaggtatccggggtagactgttccaatgagtggtgcgaggcagtatcagaaaaagagtatggtaacttaaaataaggagtggactatggaatacagtaaaattgggaatacagatatagaagtgtcaaaattatgtgtgggctgtatgagttttggaaaagccggaagaaaaatatagcaagaattataatttgctttatagagaggatgaactttcgttcaattcaagagagtgcggacatttttaaactcctgagtctccgaaatgtgcataaacacctaaaaaatgcagaaaataaaaacaaaacatacattatgcacaaaaagcgattgcgttttttaagcataaaatcaatagacgattgtaaataaatatattataatccatattaaatcaatcaattattgctattatgtatatgctggagattggttcagtgtttctaccaactaccgtaaagagttgactacataatcctatgtggtgactctttttttatttgcctaaaaagagttttatttgatgaccctttttaggctaatattttttatagggagggggaatttttcataataagagccgaactacatagatggcagaattgcaaaatgtgaaagtgaggttatacttatggaaaaaagggatagtttttttgaaagattttttgggatttcacaaagtggttctacaatgaagattgaagttttagcgggaataacaacatttattacaatcgcttatattctcattctgaatccacagattttagcagacccatatatgattatgggagatactgttatggcaggaaagatttccaatggtgtatttattggtacttgtattggtgcattcattggaacaatattatgtgctctgtatgctaaggttccgtttgcacaggccccaggaatgggactgaatgcgttttttgcttataccgttgtattagctatgggatatacctataatcaggcattagtaattgtattcatatctggtattttctttattgttattacagcagttggacttagagaagcaatcatccgttcaattccggatgctgtaaaaatggctataacgccaggaattggtttgtttattacgattatcggattgaaaaattccggattagttgtaggaaattcagcaacacttgtaagcatggtagactttgcacagtggagaagtgaagatggagatgtttcactaatttgtggagcacttgttgcgctgatcggtctgattgtaattggtgttttaaatgcacgtaatgtaaaaggttctattatcattggtattttagtggcaactgcagcaggaattcctttgggagttacaaaattatcttcttttgacatgaatctgggcgcaaaattcagtgattttgcagaagtatcattatttaaaatggactttgcaggtttatttgcaggggaaaatatagtgagcacaatctttacagtagtaatgcttgtacttagtttttccttagtcaatatgtttgattctattggaactttgatgggtgctgcaagacaatcaggtatgattgatgagaatggagaaatcattcacatgaaagaagcattgatgtcagatgcgatttcaacagcagcaggtgctatggttggtacatctacagttacaacagtagtagaatccagtgcaggtattgctgcaggtggaagaacaggtatgacaagtttagtgacagcagtaatgtttcttgcttcaatcatatttgcaccaatagtaagtatcgtaccgggtcaggcaacagctccggctctgatttttgtaggtattctgatgcttagtaatattaaagaagttgatttcagcgaaatgtcaaatgcattgccagcattctgtacagttgtatttatgccatttacatattctatcgcaaatggtgtagcagttggattgatcacatattgctttatgaaactgtttacaggtaaagctcgtgaaatcaaagctttgacatggattatttcaattatatttatcttacgatatgcctttatgacattgggataaagcagaaggattttattgtaggaggtttagtagataatgaatgaaaaaacagatcttagagctttaagggggcagattgtatattctgaatcttcgaataaattaaagatttgcgaaaatggatatcttgtatatgaagcaaatgaaatcaagggagtgtatccgatacttccggaagaatatgaaggaatactggtagaggattatggagacagactcatcgttcccggatttgtagatttacatgtacatgcaccacaatatgcttttcgtggattaggtatggatatggagcttttagactggctggagacaaatacttttccagaggagtcaaagtataaagacatagtttatgcaaaaaaagcttatcagatgtttgtagataatctgaaaaaaagcgcaacaaccagagcatgtatatttgcaacgattcataaagaatcaactattttattgatggatatgcttgaaaaagcaggacttgctacgatggttggtaaggtaaatatggatcgcaattcaccggattatctgagagaagaaacagaagaaagtgtaaatgaaacaatctcttggcttgaagaagtacaaaagaaacagtatcaacatacaagaccaattttgactcctcgatttataccgagttgtacagatgaacttatgcataagttgaaaggtattcaagtaaaatatcagattccagtacagtcgcatctttcagaaaattatggagagattgcatgggtacaggaattatgtccaaaatcagaattttatggagatgcatatgatcagtttgggctgtttggaagagacagcaagacggttatggctcattgcgtacattcagatgaaaatgagatcagaaggatgaaggaaaatggcgtgtttatcgcacactgtccggaatctaatacaaatttgtcatcaggagtggcacctatcagacaatatttgaaagaaggaatgcatgtaggattaggaagtgatgtggctgccggatctactgaaaatatgtttgcagctatgaggtacgcagttcaggcgtcaaagttgcgttggagattaaaagatgacaaattgactcgattaactatgcctgaagtattttatatggctacaaaaggaggcggagaattttttggtaaagtaggaagtttcgaagcaggatacgaaatggatgcagtagtgcttgacgataaacgattgattcatccacaagagatggaagtggaacagcgtttagaacgaatgatttatttggcggatgaacgagaagtctatgctaaatatgtagcaggagaaaaagtatctgattaaaaaagagcttctttaaaattaacgaaagattggggctcgacaataaagaattctcgcaagaggcagaaccccaaatctgcctcttgcaagaaaatacccgttttacctcttggattagtatttaattaatgcaaatccaagaggtttatttatgtatttttaaaaaaagtacttgacaaaacatcctgaaagtgaggaaagttgatatggcaaatgatatcgttaactacatattcaaatcttaagacacattcttataattcctaaaatcagcaaatgtaccggataaaaaagataattaaaccacttattctgttttccgcgttctccattataagtaagcgtcagaccaaatccaagtaaagcccacggttctttaaacattgaaagataggaaaatggaatcgcaagtgcctgtcggtcatgaaaaatataatagaaatatccgatcagcaccgcatggtgttcataatctaatcccaaattcattgcagcaaagcacaatactgccacaatgagaaatgatacgaaataccataaagctttcggcaatgctgccatcttttccctgagtccatcaatcagccagatcatggcaagcaccaaggctaacgtaaacataatattgttccagttgacttcaaaaaatgtagctgttgtacacatatcaaaaggaatttctgatattactccaaatacaagaagtgtaattaaatacttccatttattttttgtgtggaaatagccttccacgagaaggaagataaatattggaaatgcaattcttcctaaaatatcaaaaaaatcactcaaccgatttaatgatcctccatccaaattcggatagattaacgctttgtttgcgtgatcgataagcatggatagaaaagcaatgtatttaagctgcgctcctgaaaatattttgattctttcttttatattgttcataaaaattagtccttttttcaatttcttcttttatatgatatcatactatttcttcaattacatccacttattgggtcaatacacatcttcatagagtgcgagtgtagtttatgagattaatttctgatatactagaggcaagaaatgagtgcgtactaagaaacaaataatgtcagaaatggaagattggaattgaagggattgattccaacatcggtacggcaatccataccacggtagtgctgcttatggaatggttcatggtgttttgttgtttatagcaggaacggttttgctggcaattattaaaaaaagtaatcgtaaaaagtaatttaaggaatggttgaggatttcgcccttttatgatatgcttttaaattataggtaaaagcgaggtgaggggtgtgctacacataggcatatgtgatgacaatcaaaaagatatcagtcgagttcaggaactggctggcagattttcagaacaacacccagaaatgcctgtacagatacaggcttacagctcaccatatgatttattggatgatatagaaaaaacaggtgggtttgatctgtatttattagatgttgttatgccacatatgacaggtgtaacgttggtcaggcggatccgggaacaaagagcctgaaaggtctgaaaagaaccttatttacaaaggctgcaagatgggtgtttgagatggatgtagtagacagtacagacaacacactgtatcttgatttccattactgtccattggtaaaagcatggcagaaagggggatgcagtgacgaagagattgcaagattgtgtgatattgcaatgtgtggagatcatggaatcggaaagtgctttgatgcgagacttgagctgccaaaatcaatcgcaaaaggtgatgatgtctgtgcgttaagatacatcaagctgcacgatgaaaaggtggcaaaatgaaaaaagtaaatacatccttcacagatctttcagatgccgtgattcgattcgctcctatcgatatagataaacagcaatacgcatctgtgcacggagaaaatgaaaatatatcagtggataagattcatctggtggtggatttttatagagaattggttggaaattataagtaataagtggagagaaaatgttaaatattatagaaatcaacaacttcaatgaatcagaattagatatctacgcacgttacacggaagcacagcttctgaataaagactgtccggaagatggactttttattgcagaaagtccgaaagtgattggacgggcgttggatgccggatatattccaatatctgttctggttgaaaagaaacagatggaagaaaatgaagagacgcaagaagttcttgcaagatttgagaatacaggcacttctatttttacagcagagtttgctgtccttacgcaattgacaggatttaagctgacgagaggaatgctttgtgcattgaaacgccgaccactggaagatttcaggaaactttgcgagggaaagaacaggattgccattctggaagacgtgatgaatccaacgaatgtcggagcaatctttcgatcggcagcggcaatgcatatggatgcagtgttactgacttcaggatgcagcaatccattgtatcgaagagcatccagagtgagtatgggaacggtgtttcagattccatggacatttattcaagacgataaagaacgcagatgcgacaggaaagagatctggccggttcaggcgatcgagaacttgaaagcacttgggtataagacagcagcacttgcattgacagatgattccgtaagtattgacgatccgcaacttatgagcgaagaaaaactggcagtgattcttggaaccgagggggacggacttatgcaggagacaatcaaagcttgcgattatactgtgaagattccaatgtcacatggtgtggattctctgaatgtggcagcagcaagtgcagtggcgttctggcagttgaggaaataaagatttatcgtagagattctttttcgagtgcggacgaaaactgaaaatattattttagaaagtcgcttgttagaagaatggtacaggaacgccgactcagggttacgcatactgttcatactaggaaaaacaacagactgctaaaagcaaagaaaggattgacaaactcgctgctactcagacagttgtcaatcctttctttaacgcaatctattgtttttcaagtatgagcaagtatgctccacattcgtcttcgtccctgtaccatccttctaacatgaaacttctcggacttcatattttctgttttctgtttattgaaaaagatgaattcctacgacaaattttattaaatacaaacacgtttgagatatggatatcattctatagaatatccggtacgtctgcttctcaagtagagttcttctttcgagagagtagaaatcagatagcactgaaaaatttactgatagacagacagcgagggtttgattcaggtgactgttcttagtctttcctgtatacagaacccggagcctgcatcaaatcctcgctgcctgtctattcgaataaacttcatatgtgctatctgatttcatccgaactcgaaaaagaatctctatgataaatctctatttttcagtaaagtatagatgaaaatcacgtatcatttccccacaaaaagaatgatgtcatataaaatgttacatttttcacaaaagaaatttccctggtgtaaagtttttgtaaaacaagtgtcttgtcacctgtaaacaacagtgatataatgggcaagaataaatcaacagagcaatagacatgaaagcgtgttacagcagaattttatgtcaggagagaataagagaggtacgtgctatgacaatcagagaagagatagaacagttaaagaaagaaaaaaatgccgtaattctggcgcattattatgtaagaccggaagttcaggagattgcagattatgtaggagattctttctatttaagcaaagttgcggttggtctgaaagagaagacaatcgtattctgcggtgtttcattcatgggcgagagtgcaaagatcctgaatcctgagaaaacagtgcttatgccggatatggcagcagattgtccaatggcacatatggcatctgcggagacaatcgagaagattcgttcagagtatgatgatcttgcagttgtctgctacattaattcaacagcagaactgaaaagacattctgatgtctgtgtaacttcatccaatgcagtgaagattgtaaaagcacttccgaataaaaatattttctttataccggatcgtaaccttgcacattatattgcaggattggttccggaaaagaacttcatatataatgaaggcttctgtatcgtacacgaatacatggaggttgaagagattcaggaagcgaaagcagcacatccggaagcagaggttctttctcatccagaatgtccggcaaaggttctggaactttctgattttgtcggaagtacttcagaaattatcgcgcaggcagaaaaatcagatgcgaaagaatttatcatctgtacagagagtggtgttttgtatgaacttcagaagagaaatcctgagaagaaattttactttacagagacaactccgatctgcagaaatatgaagaaggttacacttgagaaagtgcttcatgtattaaagacaggcgagaatgaggtttttgtagacgataagcttcgtgaagaatctaagaaaccgttagagagaatgttagaacttgccaagtaaacagagggcagataggattgacagcaatcgaagatcatagaaaatacagatcaaatcgaccaatgctgtcggaatggagatatttattatgaaaatggaagcagatgtagtcattgtcggaacaggtgtgggagggcttttcagcgcactgagtcttccgagagaccagaagatcattatgattacaaagtcagatttagagagcagtgattcattcctggctcagggaggaatctgcatgctgcatgacaaagatgactatgacagttattttgaagatacaatgaaagcgggacattatgagaacagaaaagaatctgttgatcttatgatccgcagctcaagagagatcattcatgacctgattggctatggtgtagatttccaaaaacaggaggcagatgagtctggaaatgaagccgcagacaacggtggtgaaaaggcagagattcaggatatttatgcatttactcgtgagggagcacattcacgtccgagaattctgtttcatgcagatattacaggaaaagaaatcacaagtaaactgcttgcacaggtaaagcagctttctaatgtaacattgattgaatatacaacaatgacagatatcattgtggaaaatgatgaatgtagaggaatcattgcacaggataaagatggaaatgaattcgaaatccatacagagaatacaatctgggcaagcggtggaatcggtggacgctataagcattctacaaatttcccacatctgacaggagatgcacttactatttccgaaaaacacggaatccgtttagagcatttagattatgtacagatccatccaacaacattgtattccaagaaaccaggaagacgctttcttatttcagagtctgtccgtggggaaggtgcagttcttcttaacagcaagaaagaacgtttcgtaaatgaacttcttccaagagatgttgtgactaaagcaattcgagaagagatggaaaaggaaggcacagatcatgtctggctgtccatggaaaaacttggaaaagaaaccatcatgggtcatttcccgaacatttatcagcattgtctggaagagggatatgatgtgacaaaagaatgtatcccggttgttccggcacagcattatttcatgggtggtgtatgggttgactcagacagcaaaacatccatggaacatttgtatgcagtaggagagacaagctgcaacggtgtacatggtgcgaaccgtctggcaagtaattcacttctggaaagccttgtatttgccaaacgtgcggcaaataaaatctcaggtacagagaatgaagtaaaagtacgtgaattggcataataatagtgatataatattaatctatgctgaaaaaataaaagttaagagaagagtagagaaagaatatagaaacagggacaggagatataaagatgaacgaaattacaatgacacttcaggcagaccatttgattcttgaagcactcaaagaagatatttcaagcgaagatgtaacaacaaactcagttatgaaagactatgtaaaaggtgaagtagaactgatctgtaagcaggacggtataattgccggactggaagtttaccgcagagtatttgaactgttggatgcagatacaaagacagaactttactgtaaagacggagacgaagtaaagaatggtcagctgatgggaaaagtaacaggagatatccgcgtacttctttccggtgagcgtgtagcactgaactaccttcagagaatgagtggaatcgcaacttatacacattccgttgcaggacttcttgaaggaagcaaaacaaaacttctcgacacaagaaaaacaacaccgaatatgagaatcttcgagaaatatgcagttcgtgttggtggcggttacaaccacagatataatctttctgatggagtactcctgaaagacaatcacatcggagctgcaggaagcgtaaagaaagctgtcgagatggcaaaagactacgcaccatttgtaagaaagatcgaagtagaagttgagaatcttgagatggtaaaagaagcagtagaagccggagcagatatcatcatgcttgataatatgtcaacagaagagatgcaggaagcaatcaagatcattgacggaagagcggagacggagtgttccggaaatgtaacaaaagagaacatcggacgcttgacagctcttggcgtagactatatttccagtggagccctgacacattccgctccgattcttgatatctcgatgaaaaaccttcatgctgtagagtaaaagtgatataattgttaaagaacaattattagtatggatttcaatttagaaaggaagaggcatgatgacaggaccagaaagaagaactgccattataaatcagataaagacaagctcagcaccggtgccgggaaaggcattggctgcacagtatgaagtaagccgtcaggtgatcgtgcaggatatcgcactcatccgtgccgcaggacatgacattatatctacaaacagaggatatattttgcacgaatcacatttagtagaaagaatcttcaaagtgaaacataccgatgaccaggttgaagatgaactctatacaatcgtcgatctgggcggaagagttcgtaatgtgatggtgaatcacagagtctacggtcatatggaagcatcactcaatattaattccagacgaaatgcagtagagttcatagatgacatccgaagtggaaagtctacgccactgaaaaatatcacatccgattaccattatcatgtagtagaagcggatagtgaaaagacattggatatgattcaagaagcactggaagaaaaaggatttttgctggagcaagaagagtgggagaaagagctttttgcaaagtaaagatttatcgtagggattctttttcgagtgcggacgaaatcagatagcgcttataaagtttcttctaatagacagccattgagggattgatgcaggctccgggttctgtatacaggaaagactaagaaaaacgaaagattactaaaaacaaagcaatgctcggcaaactcgctgccgcttcagacagctgcctcgcattgctttaacgtaaccttccgtttttcaagtctttccaagcacacagaacagtcacctgaatcaatccttcaatgtctgtctatcggtaagttttcagtgctatctgatttctgctctctcgaaagaagaactctacttgagaagcagacgcaccggatattctatagaatgatatccatatctcaaacatgtttgtatttaataaaatttgtcgtaggaattcatctttttcaataaacagaaaacagaaaatatgaagtccgagaagtttcatgttagaaggatggtacagggacgaagacgaatgtggagcatgcttgctcatacttgaaaaacaatggattgcgttaaagaaaggattgacagctgtctgagcggcagcgagtttgtcaatcctttctttgcttttagcagtctgttgtttttcctagtatgaacagtatgcgtaaccctgagtcggcgttcctgtaccatccttctaacaagcgactttctaaaataatattttcagttttcgtcccctatatcccttgacatctccctttttattctgcaaaatagtaagaagagtctttcaagattctactttattatagaagaaaaagaggtcatttatatggaagaaatcatacagtttttagctgggattttgaatagagagtttattcgtgcggtgtttagtaacccgagagtaaaggataatgtagttaaggcaaagcttcgaccgatggaacagaagggggagcttttgtttcagttggagtcttttacaaagacgcaggcatttcataagaatctgacagtggaagagacgaaggatgagcttgcgaaattgttggaagagtttcgtcaggttcaggttgagacggtgagtgaggatatcacggtattgctcagtaagaaagggaaagcaacgattaagagaaagcgcaagaaggtgcaggcgaaggcggcagatctgtctcataacaggaagaaaaaatatattctggaggaagggattgtggttccgtttcttcaggatcttggagttatgacacaggatggaaagattgtgcggacgaagatggataagttccgtcagattaatcgttttctggagtttgttgaggacattctaccgcagcttgacaaagacagagagcttacacttttggacttcggatgtggaaaatcatatcttacatttgcgatgtattattacttacacgagttgaaagggtatgatattcgtattatcggattagatctgaagacagatgtgattctgcattgtaatgaactggcaaagaagtatgggtatgagaagttgacattccttgttggagatattgcggattatgaaggtgtggatcaggttgacatggttgtgacgcttcatgcgtgtgatacagctacagattatgcacttgcgaaagcggttggctggaatgcgaaagtgattttgtctgttccatgttgtcagcatgaggtgaacaagcagcttgaaaagcagagaaatctgcattcaggcaagatgaaatcgaagacggaagttatggaagtttcagaaatgctgggagatcaactagcttccatggaagaagtgctcggaccaattatggattatggattgttgcgagagcgttttgcagcacttgtgacagatggacttagagcaaagcgtctggaaagcgagggatatgaaactcaggtattagaatttattgatatggagcatacgccgaagaatattctgctgcgtgcagtgaaaaaggggagtcttgcagcaaagagcagaaaagaggcagaggattgtgaaagatttttgaagattcagccaacattaggtatgcttctggcagagcaaaagggagataaataatgaaaaaaagggtaataaagattgccgcactggttgttctttttgcggctgtgctggtgatcagtaatgtgatactgaaccgtggaaatgatgatcaggttgtggatatgggagatgccacgttacctagagtctcatttatgatggggggacagaagataaatgcgttgtctggttatgtagatgatatggatattgccgcaatgcgagataccattacaccattagagagtgatggtacactgaagatgcagattgagaaaaatgataaccagatccaggagatcagttacagtgtatattctctggatggaacagagacatatgataaaggaactctaaagtctgcagaaagcgaagatgtcacattaaagctgggaaaatcacttggagataaaatccaggaggcagtacttcaggtttcgcttgtgatcggcgaggagaaagagacaaggaaagttaatttttatacaagaattgagaaagcagatgatattacagcatcacaatgtcttacatttgcacaggattttcatacgaaagcatttaataagacggatgtagattcattgaatatttatctagaacctggagatgagagtgataatacaacttatcagacagtcaatatccattcagatatttctcatattcagtggggaactatgcaaccacagttgcttggtgatgtgcgttggagtataaaggaaagtaatagtgtgtatacctctctccttgcgaattacagagtttcctgcgtggatgatgccggtgagaatgcagtttatgatattaaagaatttttccgtgtgagaatcgcaggaactacaatttacctgttggattacaatcgtgatatgcaggaagtattcagtgagaatagaagtgtgatcgatgaaaacggaattctgctcggcgttacaccttcagatgttccgtatgaggcaaatgagaaagaaacgattgcagcatttgtggagtccagaaacctttggatgtacaataagagttcgaatgaattattaaatattttcggatttgcagatgcagatacgacagatgaaaggaatctgaatgatcaacatgcagtacgtatcatcagtatggacaatagtggtaatcttgcatttgctgtgtatggatatatgaatcgtggcgaacacgaaggagaagtcggtgtcggaatctattattttgatgttgagagaaatctgatccaggagaaagcatttataccaagtaagaagtcctatgcaatcgcagcggatgagcttggcaagatggtttattataatcatgcggaagagcagttatatgttttggcagacggaactttgtatcaggtagatttgaaaaagaataaacagacaacacttgcagagaatcttaaagaaggacaatatgcggtttctgatgatggacatctgatggcatatcagtcagaaggagataagagtggcggaacagtgattcaggtaatgaatctaagcagtctggagacgaatactgttgaggcagcaagcggagaaaaaattagtccacttggatttgtcaatggtgactttatttatggaaaaatgaaatccgaggacgcaggaaagaaagcttccggagaatcgatcactccaatgtatgaactggaaatccgtaattctaagaacaaaaaagttgccagctattcctttgttgataaaggcatttatatttctgatattttaatcgatgacaatatggtaacactgaatcgtgtagagaaaagcggggatatttacaacgttacttcacaggagtttattacgaataatgaggaacgcaaagatacagcgattaaaatagaagtatacacaacagcactgatggaaaaacagatgcggattacatttgcagagggagcaggagagaagagcgtgaaagtgatccggccgaatcagctggcatcaaagaatgaacttgagatggttcttgctgataacagcgaaagtgtgaaatactatgtttatggtgttggtgaactggcaggaatttatgataaagcttcttatgcaattcagaaagcacagaagatttcaggagttgtgatctcttctgaccagaaatatgtttgggagaaaggaaatcgagatcttgcgtattcgatagaggatgttgctctttcaaaagaaggagaagagacatcccttgaagcatgtgagcgctatatgaagacatatgatgctcagaaagtagatctgacaggatgtacgctggatcaggtactctacgtgatcaatagaggatgtccggtgattgcacttacaagtgcagatcatgcaattcttctgacaggatatacgaagaatgatattacttatatcgatcctgaaaatggagagtcacagacagtttccatcagtgagatggaaggaatggtttccggaagcggaaatacatttattggttatatcaaatagaaagtgaaataaaaacgacaggttcttcaatagttcaaatgaagatcctgtcgtttttaggttgcataagaaaaatcttataaagctttcttaaagataattcctctatatttgttgagtgctccgtaaagaatcagaccaagcacaccggcggaaattacttctccgataccaactgtcagcatcatgaaaggaatcggaagtggaaccatataagcatattttaatacaaatggaaccacaatgatattggcaacaaccggaggaacaggggcaaggaacttgctcttgtttcttaaagaccatgtaaagatggcaccgatcagtgttgcaaggctgccgaagataatgtcaggcaggattgcacctccaagtgtgtttccgatgaggcatcctacaaacaatccagggattgcagccggagtaaataccgggaggattgtcagtgcttccgcaaaacggatctgcacctctccaaaagccagtgatgcaccgacaacagtcagtacgacatagatggcagcgatcatagctgcctgtgccaggtaaagcactttgttacttgagtttttcattattcagttctcctttagttttgttttacgtgtggaaggtcacgaacacacgattcattttcgcgcagcaatgagtcaggcggccatgcttgcatggacatttgacgaatgccgcggaagtcatatacagtaagtatatgaccttacgccggaaatcggcgaaccccttataagaccttgttttttagggttttgtaacgggtgatagtatagcatgataaggggaaaaaatcaagggaagtaccaactaaggaaacaggaggttactgttcacaggtaatatcccgcgaggtgttttgctatgaatatggcaaaatcccgagacatacggggcaaaattccatcaccgaaggtgatttggaatgaatttcgaccaagttgctgtgaacggagtgaacagtaaccccgaacgttcgcataacggaataaatagaaaaaggcggttgcctgtccggtatcaacgtaagcgtcaaataaaacagtgtatagaaaaataaccgtcagccttttatactaaaaggtcaacggttatcgacagaattcttttacaagaggattccaaggcagataatcatccagatattcaggatgttcaagaaaagcactccccggcatgtcggacaggatatattttatatatttcatcggggcaagcccattcgctttcgctgtctctaccaatgtatagattcctgcactggcttccgcccctttcggactgccggagaatagccagttctttctgccgatcacaaagggacggatacagttttccgcaagcgaattactgatggaacaattcccgtcttccagataattccaaaaaccttcacggttatttaaggcgtaatgaaaagcttttgaaagtttggatttcggcagctctccgatggcacttttttctgcccatgaccaaaaagcctcgagaagaggtttctcgcggataagacgttcttttttcttctgatcaggagggaacgcctccaactctgactctatgttaaagagttgattcagacggaggattgcttccgcaggttttgatgcttccgaattatggatgtcttttgggagagcatccacgaaagcccggcgcagatgcgtatagcaaagacatctttttactcctgaaactgcattgtatccggagtaagcgtctgtatggatataaccttccatattccctcagaaacgcttccggatatttcccgcttcgtcccggctggtactcgaagtagcggatgggatttacggcatctctgatgctgcagtaaacccacatataggaatcggacgtatttttccgtcccggttctttcagcacctgtacatgtgtttcatcgatatgaagcgtatctctgtttcagaagttccagcttcagacggtggacgatgtgtacaagccagtcccgatagacaaccagaagccagtttgacatagtcgctctgcttaaacgtaatcccaaagcctcccattctttttcctgtctgtacagcgggatgcttaattcaaacttctggtggatgagccaggtgatggtagatgcagatgccagagaatgcaggacgggaggatatagcactcgagcgcttctccatataaggagttccgtttttccggcatgacctgcattcatacgtttcccggtaatggtcaatcaccttgagttttgcagggataaactgtacttccgtgcggacgaattcttcccctactttcaccatcgtactcccgcagttatcgcatatctgttccctttcatctatggtatggagtactttgctgtgagggagattttttaccagttcttcccgctgaccggtgtacttccttttacgtaggtgcttctctatctcaacaagctccggttcgtgtgcatcaggatccgcacaggtttcgatttcattaaaaagagacatctgcccctcgatttcgagagtagatgtcttctcggattttgttccataaagtttacgggtcaggaaatcaacctgctctttcaggagccggacctgctgttccagttctttgatatgatttttatactcctgttccgtagctgacataacatgaaaaccctttcgcttcgataggattattataccatagaatcgtcagatttcccagcatttctaaggattttcagtattttcagacttatgcgggagccatttctgaaccgcctttggctgctccgggttcaaaccttccagaagccagcgcagctgctgatcagaaatctgttttgcttcttcgccggtccgcggccattggagacgtccgttttcgtaccgtttgtataaaaggcagaaaccgtctccctcgtaatggactgctttgatccggtcagccctctttccacagaacaggaataaggaattgctgtaaggatccagtttgaagttgtactggatgatatccagcaagccattgagctgcttcctcatatcggtgtagccgcatcggatatagattttctccacatgggaaagatctcctaacatgactgcacggctttcagaatgttttccagcatctgggcagatgtgccttcataaagttccactgttatggatccgatatgaagtatggctgcaggagtggaacgggaaatgtttctgtccggaagtgaaagctccgcaaactcagccggggattccgttaaagcagttgaatgttggtctgtacacatgtggatgccgtttttcttgcggggcagttcttccagggcaagctttcgaattttggaaagccagtaataataacttttcaaagagatatcgtgttgttcacaccagatctgatttgtcagtccggaggccctgcattgccgtattacatccagccagtattgaagtttcacctgtttgtctggagtcaaagaagaaagatccataagcctgctccttagattagatttagagttttcagagtcaactcccaaaactctaatcaatagtttacatgcaacagccagaaatttcgatacaccctcttattggacgcttacgtatcaacgtgataatatacagacagggaaaccaaagccaggcggctacccttcttttacggagggataaaaacaccctccaaacgaaagaaaggagggcgataagatgattacatattctgatctgattcagttttgtatattcattgttgcccttgttggtctttgttatgagattttcaagggtaaacgaaaatagccgccaactattcgcagtagttgacgactataaaaatatagtttgatacaatattacgggtagccgcttgcggtttccctctttgtattttcaatataacatatctgacaccaggacgcaagaggataatgaaaacttgcaagatgcgttgctggtcgcacatggtgtgaacagtaacttcatcttaatgaaaaattaagtttaattaaggattataaagctactgtaaccaggcctgatatgatagactatgagttgtgtaaaatataattcgtggaggggaaaatgagtagaatatacaacgccctgattgaacttgttgcagccgcagtttttataattccgctttggtgcatatatgagaagattttctttcagagctggaaacgaacgatggtttatctgatatttggattttatctggcagtagtattagcattagtgggattcccgaatattacgatgctgcaaatggagcttacagtgaatctgattccgtttatttatatgttgtcagattttgttaatgcgtgtttgaacgtactcttgttcgttccgtttggtttctttttaccaatgttatggaaagagttcagaagtataaaaagtgttgccctggctggaattgttgcaacgtcttttattgagatttctcaactttttactggcagagcaactgatatagatgatatcattacaaatagcatcggtactttgatcggctactttattgtacgttttgtgacagaaaactttacaaagcgcactttatcagattcaaaaattaatgatttttatttgatctgtggttcagtaggtgttattatgttttttttacagccatttgtctcaacatggttatggggaatacttttatgataagcccggatatcagtttcaataaggagtgagcgaacatgacattacagcaattaacctatttagttacggttgcggattgtgggaatattacggaggctgcagaaaagctttttatttcacagccgtcgcttagtgcagcaattcataatcttgaaaaagagatgggagtgactgcatttacaaggtctaacaaaggcgttactgttacaagagaaggcgaagagctattgtcctttgcaaggatgctcttagagcaggctgacaatatgaaagaacattttggaaatggagagagaagaacaccaaagttttctgtgtcttgccagcattattcgtttgcggtaaatgcttttgttgatctgatcaaagaatatgatgcagaccagtatagttttattataagagagacacagacgggcgagatcattgaagatgtggcgagcggaaaaagcgagattggagttctttatctttcggaacacaatgaagatgtgattctgaagctgataaagaataatcagttgaaatttgaggaaatgtttgttgcagaaccgcatgtatttatctgtaaagatcatccactggcagagaaagaaatgatttccatggaagatttacgaccatatccgtatcttgtttatgaacagggaaataataattcgttttatttttcggaggaatttataagtatgcttgatttcccgaagagtatacaggtgagagacagggcgaccttatttaacctggtgatcggattaaacggattcacagtaagcagtggtgtgatcgaccagaaattaaatggaagcagtattatagcgaagccattagatgttgacaaaacgatgaggatcggtattattaaaaagaaaaatattattttcagtcgttatgcatcttattatgtagaggcgctgagaaggcatttgtaaaaaataaagagcagggatttcgtcataatgaaatccctgcttcttcttttactagcagaagaattcttttgcagctcgtaccagatactcagtatctttcacacctgcagtttcataaggggaatgcattgccaactgcggaagtccgatgtcaacggtattgagcgcaacctgagtgttggaaatatttccaagggtagagccaccgaccatatcagaacggtttgtaaatgtctgaaccggaacatctgcccgcttacataggtcgcggaacatggcagcagatacggcgtccgtacagtacttctggtttgcattgaatttcaacacgattccttcgttcaggtaagggcggtttgtcggatctgctttctctgtatagtttggatgaaccgcatgagcattatccgcagagatcataaagctgtctgcaagatgaacacgataatcttctccatcatatccaagtgcttcgtgaacacggatcagtgtgtcaaaaaggaatgtggatgcggcgccctgtttcgtaccgcttccaacttcttcattatccagaacacagtgtacagccatacagtcttttttctcaccggaaagaaaaccttgaagtgatgcgaaggcacactgcaggtcatcaagtctgccgctggaaatgaattcttcagaagccccccagatggaaccttcctgtcggttataaaggaatagatcatgaccgagaatttcatctttttctaccccggcagcttcagcaatctgttccataaaagttcctttaggagaaccacagccataaagtgggagaagatctttctgggcgttgtagttgtaaccgctattgatctcacggttcatgtgaatcgcgagattcgggatcataacaaggtcccggtcaatattgacgagtttgctcgtgaattgtccgtttgtcttatcttttattataacgcgtccggcaacagagagcggacggtcaaaccagggtgcacagagcataccaccatatttttctacatttaatttcacataatgtttttctacttcgatctccggattctctttgatcttaaaggtcggagaatcactatgacttgtcagaatgtgcatcttgtcaataccattttccggaattgtaaacgcaatcagggaagagtcatttcgtgtaacaaaatagtgtttgccgcattctatattccaacgctgattttcctttagttcagtaaaatcaactgcaagaagctctgatttcatctgttgaactgcatgaaacgctgtgggactcttttgaagaaattttaatagttcttgagaaactgaattgttcatagatatttccttctttcaaattgttttaaaaatctttttttgctgatatatttactttttagaatagggcaaatcagagagaaatacaaggcggaaaagcataataaaaaactttttatttaagaagaatttcacaacatactgtcttaaaatgtgctataatctaatttggaatgtcagagattccattggaggagtacgaatgaaaaaaatatctttgaaaataaaattaacactaaaatatacaggatgcatatttgtggcaacaggcattgcgttgttttttgctacaatgataagtggaacagatgcgcagacagcaaaagcaatggcgaaggtgatacttccaatcgttttcatcgcatcgcttgcaattggatactttctggtaagagaggttctgaaacggactgcagatctagcagagtcagcggcggaaatctgtagaacaaaagatttctccagacagttggaactggaagaatctgatgcggaatttgagagactgcagctgacattgaatgaattacttgaggatgtgcgcgaagagggacattttgcagaaaatgttgtacaggagatgtggatgccggtcagtgtgattcttacaagaagcgcatggtgtcttggcgactggcgactgtcccagcgtcagcgttggcagattgaattagtgcagaagaaggcacagattctttcagattttattcaggaagtctcattttttgcaaaggcggatcagggatgtcagccagcttataaaaaacgcatgaatatcagtgaactgacaacaggaattatagaaggtcagatcagcagacttcaggaagcagatgaaccggtgcagatagaatatgagattgaaccggagatttacgcagaagtggatgagaattgttatcggaagatgctgttaaatctgctggagaattccattgattatagtcgagagattggactgatcaaagttgttgttgaaagcaaaggcagtgagtttacctgtaagattgcagatgcgggaattggaatttcggagacggatctgccacacgtatgggatcggtttttcagaggagatcctttaggtgccggagaaggtcattttggactgggactttctgttgtaaaatggattgctgaagtacacgatggctgggtagatgcagaaagtattctgggatccggaagctgctttacagtggggatgccgtgtgaaccgaagccggagcctgaagcggaagaagtgactgaggaagagaagacggttgatgcgctgttagaaggaattgctggaacggacataacagaagaggagacggatgcagatctgactacagaagcagaaggagcagttgagacagatgcaactacagaagaagctgagacagaagtaacatctgaaataaatgaaacggctgagacagaaggagttacagaaataagtgcggcgactgaaacagagtcagtgaccgaaaacagagatagctcagaagagtccgaaactttgggtgagacaatcgcgatgcctgtgattacagaggacacagaggacacagaggaacagtcgtcagagaattttgtgccggatgcagagaaagatgaaacagacgtaaagagtgaaattccgtttaggaaaatcaaaatttgtttatctaaaatcaaaagctttcttgaggaagaagatgacgaagaagattcagacgaagacgaagaagcttcaaatgaatgcgaagtgattccatttaaaggcaaagaggattcagatgaaaaataaaggtaactgttcagagtcaacctccaaaatgctacgcatttcgtcggtgtggcgtatccgccaaataaaatctcaaaaacagtcttaaaaatgcaagcattttacacctgttttatgaaattttgcttggctctgaacagttacaaataaagagggggatttttgatatgaaagatgtagcaacaatgaaggaagaactaaagaaacttattgacacggcagcaggacgagttccggcagatctggtgatcaaaaactgtaagattgtaaatgtattttctggaaaaatccaggaaggtgacattgcattttcaggtaatcagattgcaggtatcggcgcgtatgaaggtaagaaagtcattgatgcagaaggaagatatgcggcacctggatttatcgacagtcacatccatattgaatcttcttatgtaagtcctgaagagattggacgcctgttagttccacatggaggaacgacaattatggcagatccacatgagatcgtaaatgtatgtggaatcgccggccttgactatatgatgaaagcagctgagaacacagtgcttgatgtgaagtatgaacttccatcttgcgtaccggctacaccgttcgagcacgcaggtgcggtgatcgacgcagaggctatgaaagagccgattacaagagaaggaattgccggacttggagagtttatgaatttcccaggtgtgatcaatgcggcagaaagtgatcttgataagattgttgtagcaaagcaggaaggtaagtttattgatggacatggacctggaattacaggaaaagaactgaatgcatatgcgtcagcaagaattgcggcagatcatgaatgttctacagtagaagaaatgaatgatcgtttggagcgaggaatgtatattctgctccgtcagggatctgcatgtcacaatcttcgcacactgatcaaaggtgtgacagcggataacagtagaagatgtctgctctgctctgatgaccgtcagccgaagacaattcttcatgaaggacatctcgataatcatctgcgcatttgtgtggaggaaggtcttgatcctgtgacagcaatccgtatggcaacacttaacgcagcagaatgctttgacctgaaggacagaggagcaatagcaccgggctatcgcggagatgtagtacttttggatgatctgaaagatttccatgtaaaccgcgtgtttgtagaaggtgagctggtagcagaagaaggaaagtatctgccggagattaagaaatgtgatattgcatctgttaaaggcagtgtgatcgtaaaagatttttcaaaagagaaatttaaaatgcatctgaaatccaataaagtgaatgtgattcagattctcccgggtggagttgtaacagcgaaagatatagcagagattgaactggatgcgaatggagagtttgtgagaaatccagaggttgatcttgtgaaagtagctgttgttgagcgtcatcaggggacaggaaatgtagcttgcggattcttgaaaggatacggaatcaaagaaggagctgtagcactttcagtggcacacgactctcataacattattgttgttggagtgaatgatgacgagatggaatttgccgtaaacagtttggttgagcaggaaggtggaatcgttcttgtaaaggaaggcaaagtgattgagagcatgccaatgccgattgccggtctgatgagtgatcagagtggagaatgggtagatcagaaattaacagacattcacgaaaaagcatacgaagaacttggaatctgtggagaagttgagccggtaatgacactttgctttatgtcacttgcagtaattccggagattaagcttacagatattggattgtttgatgttacaacattttcatttattccggtggaggcagagtaaatcaaatgttactgttcacacgatgtgcgaccagcaacaatcaaattccaaaaacctataaataaaggaaaacaccattgacgtactgcgcgtattttgttatactttaatagttaaataaatacggcgcagtagccaagcggtaaggcgtgggtctgcaacaccctgattcaccggttcaaatccggtctgcgcctctcaaaaagagcccgaaaaatcaacgttttcgggttctttttgttatatcatcttttctaaactcattccaacaaaaaatttaaacttaagaccgccgaaaatcgcataaaatcgaataaaagatgaatagcttaatgaatctttctttgcaaggaattgatttcggatagctaaatgcattctgccctatgagtgagtatcatcttttttttgccggttcagcctgctgtatcctcctgctgtatacttcagtagcatggagtgcacctgataccatgtatcatcctttttccagtgcagcgctttgttgacactgtaggttccattgatgataaagagggtcagcatttcggcctctttcttcgtaattccaagctccttcataaaagatgggaccagtctgggacgttgccactgatagatctggtttaccacatagcctgagattgtctcatcgtggaagacaacctgatatttcgggagttgcgcgactctgtggcagaccgggagaagggattcatttgtcttgaaagaggctgtgccgtcggatgtgagcagagctacggtctggtctacatccgcattgagattgacagtgctatcctctgctgtctgtagcgcgtcgaccaggagctcatccaacacttcagtgagtgactgataatgcagataataggttgcacgcgtgatttccgcccttcggcagacatccgtgacggtgatctgctcaaagttcttttcattcagtgcttccagaagagcgtctttgatcacattcctcgtataaagggtgcgccggtctatctttcttgtttttgcttctttttcagtttttgcatccatatgtttcacctcaactttacgaaagttaaataatttctttacactttccttgaggatgtcaagaaacgtctgttttcaagaaaagtgtgaattgtatttcatctgcaaatattgtatcttcatattaaacaatatgtcaagaactttctgaagtgtaaaaaatcagatatctttggatgaatcggtttatatgtttacacaaaacagcttgctttatgttcgtataaggagtttcgttgaactgtaatatcagccggaacaggaagtctgaggtgtttttagggcagcatcaaaggaaagttcagattcaggaatgaggaggaaatgttatgatagctattcaatgggaagacgtcattggcgtccttcagacgtgcaaaccttatctgatagcgctgggcgtgctgtggatcgcagcagttgtagttatgatcgtctgtatgaaggtgaaaaagaagagcaaaaagcggatgatccgtcaatattccgcgttaagcatgcttgtttcccttgtcgtgatcgtgaacatgatcgttcttggtcccatgtatgccatgatcaacctgaccacagtgggtggaacgacgagcaatgagacgacagaagaggcaaaggaagttgcgggacagattgcggaggaaggcatggtccttctgaaaaacgacgggatccttccaatcagcgacccgtccaacatcaatctgttcggctggtcttcggttaacccggcatacggaggtaccgggtccggcggactcaacgacctgtacgagaaggtcagcctgatcgacagcctgacagatgcaggatttaacgtaaatcaggagctggtggatttctataatgaattttccgcagagcgggcggagatgtcattgtccacacagaattggacgctgacagaggctctagcttccgcatattctgacgaactaatgcagagcgcgaaagaattttccgacacagcagcaatcgtgctctcccgtgtggcaggcgagggtcacaatgatatgccgaaagatgtaacacaggcgtcttatgataatacagcaaacggatatgaagacttcgcggcaggcgaacattacctgcagctttcccagacagaggaagatctggtaaatctggtgtgcagtaattttgacaatgtcatcgtgctctataattcagcgaacccgatggaacttggatttgtagaaaagtacgatcagatcaaagcggcactctggtgccacaggccaggcaacgtaggctttgaggcgctgggcaagatcctgaccggagatgtgaatccatccggaaggacatctgatacgtttatctacgatatgacggcggcaccgtggtggaataactgggaggcgactcgctattcgaatatggaagacatggcggtagagggtatgaactccggtatggcgcagacgtattatccgtcctttacgaattacgtggaaggaatctatgtaggatacaaatattatgagacagcggacgacgatggggcaatcgattatgatgcgaccgtgcagtatcctttcggctatggactgtcttacactacatttacgcaggagatgagtaatctgactgtaaatgacggcgagatcacatttgatgtgacggttacaaatacgggagacgtggcaggcaaagatgtggtggaaatctattacaatccgccttacacaaacggcgggatcgagaaagcaaccgccaacctgattgatttcgagaagacacagatgctagagccgggcgcatccgagacaatcacgatcacctttgatgcggaagatatggcttcctatgatatgtccgacgacggatgctatgtgctggagcagggcgactatgtgatctctgtaaacagtgattcccatacggtgctggatcagcagatctatactcaggatgagacggtccgttacgagggagacaacaagcgtgagagcgaccagatcacagccacaaaccagttcgaggatgtggcaggggatgtgacttatctttcaagggcggacgggttcgcaaactatgacgaagcgacagcagccccggcgtctgacgtgctgtccgacgaccttatggctcagtatcacctgaatagcaactttgactataagacatatatcaatgaagacgatgagatgccgactacaggcacggacaacggcatccggctcaatgaactgcggggcgcggattacgacgacgagcggtgggaactgcttctcgaccagctgacagtggaagatatgacgaacatgattgccctgtccggatatcagactccggctatggactctgtaggaaaagtccagacaatcgatgcggatggtcctatgtccatcaacaacaactttacgggcgagggctccatcggattcccgacagagacgatggtcgcctgtacatggagtaaggagctggcccaaagctacggcgagatgatgggcaagatgtgccgcgagatgaatatcgccggatggtacgcaccaggcatgaacactcaccggacgccgttcggggcaagaaactatgaatatttctcagaagacggcacgctgtcaggctatatcgcatctggagcggtgaaaggctctgcagagtatggcgtatatgcatacatcaagcatttcgcgatgtatgagatgaacgccaagatggtctgcgtatggtccaatgaacaggcaatgcgcgagatatacctgaaaccatttgaaatctgtgtaaaagacggagacgcccatgcggttatggtatcctggagctttatcggtatcaagtggtccggagagaacagcaacctgcttaagaccgtgcttcgtgatgaatggggatttgaaggatttacattgactgatttcttccgaaacaatggtcatggattcatgaatgcagatgcagccctggcaaacggtgtggatgcgatgctttccacatacgcgggcggccctaacgtagtacaggatccggaaacggcttcatctgtaaaatatatgcggcaggcgtgcaagaacgtgatgtacaccgtagtgaacagttgggtatatgaagaggacggagtggataccggtcttccgacatggcataaagctgtgatcggtgctgacgtggcagttgcagtgatcatccttggactgtgcgtcctggtatacagaaaatacagaaaagacagcgtggcaggaattgatcattaacagcctgctcgccgttatcgtgctcatggcggtcggacttttaaaatcccttttatgagcacctacgtcaacaatctcagagatagaaaaaactcatgtgagttcgttagaagaaattcacatgagtttttctttaaaatagtccttatttattttcccagttctttttataaatcagatacagcggaagtccgacaaagatcataccaccgagcatatttccaagtgtaaccggaataaagtttgcaaggctgtgaagtggtgtcagtgtcgcaatctgttcagctgtaattccgtaagcttcttctgctttcgcaacataagccggattaagtgaagcaaggataccagccgggatatagaacatattggcaacgcagtgttcgaatccgccgactacgaatgcacagattgggaagaaaattgcccataccttaccggcaatatctcttgcggaagtagccatcagtactgcaagacataccaggatattacataagattccggaagtgattccctgcagtggtgaaattgcgatctttccaacagcaactttgattgtataagcaccaagaagcccacctgagtagtttaggtttccactgtatacaatgagcagatccacgcaaagagcaccgatcaggttactgaaaaatacgatgaaaagatctcggaataatccgccccatgtgacacgcttgtcaaatacatccatgatgatcaggcagtttccagtgaaaagttcgccgccgagaaatacgatgagcatcagtccgacagggaagatacatccggcaagagctcttgctacgccaacattttctactgcgtgtgctgccgtgctgcttgtagcaccgccgaaagcgataaacgcgccggccatgatgccgagcagaatcatttttccaaggggaagacgggttttgttctcgcaggccttgatactaagatcaatgacttctgcgggagtgttaaaatgattgtccatgatataactccttattcttttgtaattcggcagtcctcttgctttgaatggtaacacagtaagagaactgccgttgttatattgctattcgtcaagaatttaacgagaatattttatactagaaaatattggatttcaagagtggaaaggtatgtttatatatagatacaaaattcgggatttttattgctttaggacagttatttgtatggtttataagcatccgtaagcaatagtaattatgcaaaatatgtttataaagttattcacctggaaaattttagaaaaatattgttttgtgtagaaaaaagatatcctcattttatcaacaaaaaagatgagttacgaacaaaaaacacattgaaatttcaagtgcatcaaattattctatatctacttctggccgggagtaaaaaacagaaggagaaacactatatgaaaaataaacttcaacgctattttcctataatcagaacaagaaaagaaattttaaatgaattgcgtgataacgatgaattatggagtcaatttgaaagctgggaagaagagaatcaagaagaatatcttgatatttgtacaggtgtaaagggagtaaaggtactttatgatacattctttaaggcagtcatgaatccggatacgcgaccagaacgattaaatgattttctctcaacagttctcggaaggacagtgaaaattctaaaagtattgccaaatgaatcggcaagaattgcagctgaaagttcattgcttgtaatggatatagttgtacaatttgaagatggaagtattgcaaatgtcgaagtgcaaaaaatcggatatctttttccaggggagcgtagcgcatgttattcagctgatatgttattaagacaatataaaagagtaagaagagaattaggaaaaaaatttcattatcgagacataaaaaaggtatatacgatagttctatttgaaaaaagtaatagtgttttcaaaagtttttcaaaggacatttatattcatcggtttcagcaacaaagtgattcaggaatagaactgaatcttttgcaggagtacacgtttatttgccttgacatttttgataacatcattcacaatgaaggcagaaaaatagacggtagattagaagaatggctcgtatttcttaaagaggatgatcccgatatgattataaaattattggaacaaaattctgaattcagagacatttatgaagaaatctataacatctgccggaacagcgaaaggatgatggggatgttttcaaaagaactggaaatattggatcgtaatacagtaaaactaatgattgatgagttggacgaggcacttggagaggaaagggaaaaagtaaaagcaataaagcaggaaagggaaacactgaaagcagagatgcaggaggcgaaagcggagaaagaatcgctggaggcagagatgcaggaggcgaaagcggagaaagaatcgctggaggcagagatgcaggaggcgaaagcggagaaagaatcgctgaaagcagagatggaagctgaaagaaaacgtgctgaggaggcagaaaaggaactgatccggttgagggcagaactggaaaaactgagaaaatagatgaaatacatagtgatatcggttgtttcttatttactctgcgctcctggagtgttataataactgttaagactgccgggaggcatctgtttgaagattctgataatagaaaaagatagaagaattatttgaaggagtaaatggtatggaactgacaacaattcgtgagttatttaagaacagagaggcatatctggacaaagaggtaacagttgggggctggattcgaagcattcgagattctaagacattcggatttatcgtattgaatgatggatcttattttgatacattacagattgtatatcatgataagatggagaacttcgctgaggtttccaagctgaatgtaggagcagcaatcattgttaagggtacactggtagcaacaccacaggctaagcagccatttgagatccaggcagaagaggttgtgatcgaaggagcatccgcaccggattatccactgcagaagaagcgtcacagctttgagtatcttagaacaatttctcatcttcgtccgagaacaaatacatttcaggcggtattcagagttcgttctctggcagcatatgcgattcaccagttcttccaggatagaggatttgtatatgtacacactccgctgatcacaggaagtgactgtgagggtgcaggagagatgttccgtgttacaacactggatatggacaatgttccgaagaatgaggatggatctgtagattatacacaggatttctttgggaaagagacaagccttacagtaagcggtcagcttaacggcgagacttatgcacaggcattccgtaatatttatacatttggaccgacattccgcgcagagaactctaacacaacaagacatgcggcagagttctggatgatcgagccggagatcgcatttgcagatcttgaggatgatatggaactggctgaggctatgttgaagtatgtgatcaactacgtacttgagaatgcaccggaagagatgaacttcttcaactctttcgttgataaaggacttcttgacagacttcataatgtagtgaactctgactttgcacgtgtaacatacacagaggcagtagagatccttgagaagaacaatgataagtttgattataaagtatcctggggatgcgaccttcagacagagcatgagcgctatctgacagagcaggtatacaaacgtcctgtattcgttacagattatccgaaggaaatcaaagctttctatatgaagatgaacgaagatggtaagacagtagcagctgtagactgtcttgtaccgggaatcggagagatcatcggaggaagccagagagaggatgattatgacaagcttcttggaagaatgaaagaacttggacttaaggaagaagattatggattctatctggatctgagaaaatatggttctacaagacatgcaggattcggacttggattcgagagatgcgtaatgtatctgacaggaatgtccaatatccgtgacgtcattccgttcccaagaacagtaaacaactgcgaactgtaataatgtaaagaagttttagagtgttatccacacatgaacagtaaagtgtgtggataacactctttttttctgcctgttatgtgaataacctttcatgccaaatagaaaatttaacatttcatccattaaattaaatggaactttaataaaattttcgctatttaacatagatttaacataacttcacagagttttttataaagccatgataatctcagatatgtaaagaagaaaaaaacactgcgtttgaaaaacagatgcaagacagtgatttgtaattgaaaacagacatgagagaggatctggaggaagaaaaatgaaggaaaacatacagattgttttcgggctacttggtggcctggcggtttttatctatggaatgaatatgatgagtgaatgtcttcagaaagcggcaggagaaaaaatgaagaaaatcctgtcacttttaacgagaaatcctgtaatgggagcacttgcgggaatgcttgttacagccgtactgcaaagttcaagtgcaacgacggttatggcgattggttttgtaagtgcaggactgatgacactgccacaggcaatttctattatttttggtgccaatatcggtacaacaatgacagcacagctgattgcatttaagttgagtgactacatttatgcaatcatttttattggatttattgtatattttatttctaaatcagaacgtgtgaaaaatgtcggaatgactatttttgcatttggtttattgttccttggaatcgagacaatgggatctgttatgaaaccattggcttcaagcccaatttttactgagctgatcggcaaagtggcagacgttccaatccttggagttgctgttggtgcattaatgactgttgtggtgcagagctctagtgcaacaatcgcagtgctccagaattttgcggctcagccaggagctgatggagtgacaagtatcatcggtctggcaggtgcaattccgattcttttcggtgataacatcggaacgacgattacagcacttctggcaagtattggtcagccgaaggatgcgaagagaacagcacttgcacactgtatctttaatatttcaggatgcttcctgtttatctggttcgtaaaaccactggcagcgtttatccagtatatttcccctaagggaccggagattgaagtgatttcaagacagattgcgaatacgcatacatttttcaaccttgtgatgacgctgatctgggtaccgcttgttggagttatggtgaaaatcgtaatgtgtctgatcccggacggagaagtgaaagaagtcaatgcagttcagccaaaatttcttgataacaaactgatcagtcagccgacagtagcattacagatggctgtaagagaggtgatgaattgtggagaacaggttgggttgatgctgaaaaaggcagcagaaaagattgatagtggagatggtgcttctgttgaagaatttgtaaagagcagagaagtgacaactgagcttacaggaaaaatcacagattatcttgcagaaatggcagcggctggagttatgacagagcagcaggcagcaagagctgcagagcttcagtatgtattgatcgatattgacagaatcagtgaacttacgaaaaatgtcgctgtttccatgcagacagaaaagcttgtgaaaaaggacaagaagagtgcaaaagaagaaagagtacagttctcacaagaagcatcaaaggatatacagaagagcatggaacttgtcagtgaaatgtacaatatggtcatgaaaatggttaataacgaagaggcaaatgaggctgaaaatcttgtcaagatgaaagaaaagatccgtaagatggacggagatattcgaaaaggacatattaaacgtgtacacaaaggaaaatgtaaggcaggacttacggctgcatttaatgagattctacataacgtggagagaatcggaaacagctgtgtgaatctggcagatgcggcagaggacggagtgagattcagcacatttttaagagagatggattagagaactttattatgagcaggcaaactttcaatagaagagagtttgcctgttttctatttcatggaaatccttttgattttatgctgataaaagaagaaaaactgtgctaaaatagttgagacaacaagaaagaacagttataatattaatctgttgatagagagaaaaaggtaacttttactaatataggaaggaagtagtaaatgaagatagaattaccaaagaaggtattatttatcattaataatctgcaacttgcaggatatgatgcatttgcagtaggtggctgcgtgagagattctattttggcgagaaaaccgcaggactgggatatcacaacgtcggcaaaaccagaagcaatcaaggaaatatttcgccggacggttgatacaggaatagaacacggaacagttacagtaatgattggcaaagacagttatgaggtgacgacttacagaattgacggtgcttatgaggatagccgtcatccgaagaaagtccgctttaccaattgtctggaagaagatcttcgcagaagagattttacgatcaatgcgatggcatataatgatgatgtccggctggtagatgtgtttggtggaatgcaggatttgaatcatcatctgatccgttgcgttggagatccgagggaaagattttcagaagatgcacttcgtatccttcgtgcggtacgcttctcagcacagctggatttcccgattgaacctgatactgccaaagcagtgaaggagcttgcaccaaaccttaagaatatcagtgcagaacgtattcagacagagcttgtgaaacttctgacgtctccacatccggaacgcattcaggatgcctgtgaacttggaattacaaaggtggttcttccagaatgggatgccatggtaggagtaaaacagaatacaatacatcataagtacgatgtggcagagcatacactttatacattgaagcatgtgaagagagataaataccttcgtcttacaatgttgttccatgatatgggaaaaccggcaatgaagacaacagatgagaaaggaaacgatcatttcaaaggacatgctctagaaagcgagaaaattgcccgtacagttttgaagcggttaaaatttgacaatgagacgattcgcattgtaacgaagctggtctgctatcatgattaccggatggaagcaacaccggcgaatgtacgtcgtgcaatgaatcggatcggtgtcgaattattcccatactatctcgcagtgcgtctttcagatgcaaaatcacagagcacttacatgagaagggaaaagattgaaaatatcgtagagatacgaaatctttacaaacagatcctgatggagaatcagtgcgtgactcttcgacagcttgcggtgagcggaagagaattgatggaactggggatgaagccgggacgcgcactcggtgcaatgctcagtgaactgctggaatatgtgctggatgatccggaacggaatacgaaagagaatctctgtaagtacgtgaaagaaaaaatggaaaaagaaaagtaggaaatgccggaagaaaaagagaatactcaggttgtccctttcatacattagaaagaaatcgttgtcggttgctgttaaaaccgacagtaaaaagtctggtaactggaaaagaataacaatccaggtcaatgggacagggggcagccatgagagaatatgagatggaagtactggaaaagtacgaacttgaagtgaatagcacccggcggatcagaggtgcattttattgcgatacaaaagaagggacgatgcttctgaaagagacaaagatctcggagaggcgcgtccctttattgtatcttattttaaaccgattagaaaagcagggatatctggtggatacacctgtgttcagtaaagaagggaatctggttcagaattccagagatggaacaagatatttgatgaaaaaatggtatccgggggaagagtgcaatctgaagagagaggaagatattttccgggcagcaagaaaactgggagagcttcatctgggatttcagtggtatgagccggacttgcaggagaaagaaatatttcagaaattccagaaagaagaggtgcaggaaatcccacagaatacaccgcagtcagtttgtgaagaaaagaaaattgactggacaaagttgtcaccattgttaagtaaaaatccattggaagaaatgaaacgtcgtaacagggaaatgaaaaaagtgcggtcatttatcagaaaacgggttgcaaaaaatgaattcgaatcctattatctgaagcattatgaagaaattgcatggcaggcagaaaaggtgacagagcagatagaacggtctggttgtcggaatctatatgaaagaagtatacgggaaaggaaaatgcttcatggagattataattatcataatgtcatgatccttccggaaaatgaggtgataacaaactttgagcggatgagaatcggaatacaagtagatgatctatattaccttttgagaaaagtaatggaaaaataccattggaaacaaaaaacaggacaaaatatattagaagcatatgaaagcgtacggcaattaaaaccagatgaaagagagtatctttgccttcgactggcctatccggaaaagttctggaagacagcaagtgcttattccagatcaaataaagcatggcttccggaaaagagtgtagagaagctgcagacagcagtagagcagacgaaggagaaagaagtatttttgagagaggtcttcgaataaaaaaagctccgcaaaccgcggaaaatgtggatttatcttgacaaacaacagggaaaccgttataacagtacataagggtttgaggcaagttatcgtgcagacttgtaacctgaataaataaaactaggaatagaattgtatttgagtacaataaaggaggacataatccatgaacaaaacagaatttattgcagcagtagctgaaaaggcagagatttccaagaaagattccgagaaagcattaaaggcatttgttgatgttgtaacagagcagctgaaagcaggagataaagtacagcttgttggatttggtacatttgaagtcagcgagagagcagcaagagaaggaagaaacccacagacaggaaaaactatgacaattgcagcttgcaaggctcctaaattcaaagctggaaaagcattaaaggacgctatcaactagttcaggggattttgtagaagaatatatgagactggataagtttttaaaagtctcccgtctgatcaagcgaagaactgtagcaaacgaagcctgtgatgcaggacgtgtgctggtgaatggaaagacggcgaaagcatctgtgaaggtaaagccgggagatgtgatcgagattcagtttggaacgagaaccgttaaggttgaggttcttgaactgcaggagacaacaaaaaaagaagaagcaaaggacttatttaaatacctgtaaagtctgtcagacaacaggaatgtataagtcgatcaatggttattgttttcagtaatcttagaaaggcagggaatattttacaaagtgagatattccctgcctttctgtatgctatacgataaagcatctttggacgcacatatataaaacccttatctgtcaggaataagtataaaagctctgacatatatatagaaaagtacagggaactgttatctgattccagtaatatactgtggagtatgccagagaagagggaggtgcagcggatggaggaacagcaaaagactgtaaaggctcataagctggtggttaataaccggaagacaagtatggtgacaggtgttctggatgtattgtcttttgatctgaacgagattcttctggaaacagagcagggaatgctgttagtaaaaggaacagacttgcatgtgaaccgcctcagtgtggaaaagggagaagtagatttgtcgggaacaatagacagtgtttcatattctaatatttcacaggcaaagaaacaggaagaaagcttttggacaaagatgttcaagtgaggaagaaagaagatgctaaatataaaaaaagaactgcttgttttcttctgtgcctgtctcacaggtgtgaatgtccgggctgggtacgagatcctgattttcttaaggaaaatgataatacataataatctggtgaaaggaattgaggatctgttctactggatatttatgagtgcatatattttctcacagatatatgcaactatgtatggtagtatcagatggtattttctactaggtcttgtatttggcgttgccgttattcagaaactgattgcgtctggagaaaaaatacacaaaaaaacaaggaaaaaccttgaaattattagaaaaaacagatagaatgttgataattgggaagtttatagggaagactccgtcagtgaaggcaggatggatttcccggtaacgttaagagtgtattattttagggtgaattttagatggcaaagaaaaaaagagtgactggacggcgcagccatacaaagcagagacgtccgagtccgtacaaaagaagcgttcttatgattttgtcagtattgtgtcttctttccggtgtgctgggagtgaatgcagtaaagcttcatgcaaagaatacagcgtataaacagcaggaagcagaactgaagacacggattaaaagtgagcaggcaagagcagaagagatcaaagaatacgagcagtatgtacagacagatgattacatgaaagagatcgcagaagataagctgaatcttgttgatccgaatgaaattgtgtttaaaccaatcaagtgaatagtaaccgaatctgcaaagccagtgaaagacggatacagaattttacgaaagataactccgggagagaaagttctcctggagtttttctttttttacgcgaacaacgagccaaagtccgtgcctgcacgagaccttggagactgtcgtgataacttgagaaacttgcggagcgtgtttctcacagtttgagtaacgagggggggatggaaatggaaaatggacaggtattacatagtagtccgtatgtggaacagattgataagtttgcagtttcattaaaacagttagcgaaaacatttttgaagttagaagaaaaaaagcagacattctcagaagaagagattgatgaaatgtttgcctgcgtaagagaagaagtgtgtgaaaaatgtgagaaaaacagttggtgctggggtgaaaactatattcagatgtatcagatgggatacgagattcttgcagcagtggatcagtatggaaatgaactggatgcagagacaaaaagaaaactgatgcagcgctgcattatggctccgcggttttatcgggggatgcttgacagttttcacgaagcaagacaaaatatgatctggatcaatcgtatcgcaagaagccgggaaggatgtgcagcccagcttgatctatttgcagatatgctgcaaaatgtggcgaaaaatctggaagacagcatatttacagatgaaaggttggggaaacggatcttatctcaattaaagagaaaaggaatacgtgtactttccatgcattttcttgtgaatggagaaggaaaatatgaattgcatctgacgatgcgtacctggaaatcggaaaagattccggtgaaaagtctggcagggactctgagtaatctgacaggaagaagattgattccgggaaaagagggagcgcagctgatcggaacggattatacaacagtggtcttccgagaaggaccatcctattacacaatgtccgggatagcaagaatcggaaaaggctgcagtaatatttcaggggacagtttcacgatgatggatcttccgggtggtaaaaggggagttgcattgtcagatggcatgggatgtgggcaggctgcctgtcgggaaagcacacttgtgatagaacttctcgaagaacttttggaagcgggattcccggaaaagactgcgatccagatgatcaacacaacactggtctgcggaagagaagaaatccattactctacgatcgaccttacagtgtttgatctgtatacaggggaatgtgaattgatcaaggcaggcgcatcctcaacttttattcgaagaaaggatcagattgagcatctgacatcgacaagcctgccaatcggagtgatgaattcacttgaaatagattcagtgaaacggcagttgacggatgggacgtatgtgatcatgctgacagacggagtgctggatgcacttccggtaggagagcaggacttccttcttgaaacaatcataaaaggaacggaaatacgaaatccaaaggaactggccagacacattttacagcaggtacttaactggacaggaaaagaaccggaggatgatatgtcagttttggttgcagctttgtggaaatgcagaaagtagccattgacatagaagtaaccgttaacgtatagttgaggtatgatggataaaagattagaaaagattgaaagctatatcagacaatatcatatgatagaaaaaggagacaggattgtcataggtgtatcgggtggcgcagactctgtatgtctgctgatggcactttgttcattgcaggaaaagctgggattccaggtgcttgtctgccatgtgaatcatgaactgcgcggagaggaggctgcacaggatgaggcatatgtggaaatgctttgtcataaaatgcaggttcctttttttgcatttcatgaaaatgtggaattaattgcaaaaaagcggaaagaatcattggaggaagcaggcagatatgtgcgaagacaggcatttgaacaactctgtagagaacagggcgggacaaagattgcgacagcgcatcatagtaatgacaatgcagaaacaatgcttcttaatatggcaagaggaaccgggcttcgtggattgtgtgggataagaccagtgtatggaaaatggatccgcccacttctggacttgtccagggaagagattgaacagtggttgaaagattgtgatatcagatattgtgttgacgaaacgaatcaggaagatgaatacacaaggaaccggattcgtcatcatgtgattccaacattagaagaacaggttaatacaaggacgatagaacattttgtgaagctcagtgaacaggcagaagaaatctatgaatatctggaaaaacagacagatcaggcatggaatatctgtgcagaacagacagacggacttcaaagcaggaaagaaatatttctcaaggcagaggaaatgaaacagcttgatcctgtgataaagaaattactgatccaaagatcagtaagtgaagtggcaggggcacagaaagatattgaaagcaggcatatcctggcggtactgcaactgtttgaacggcagacaggacggcagatcgatcttccgtatagtataacagccaaaagaatgtatgagggagttctgcttgcaaaaggtgataaaaaagctacatctgtacatcagaaagagaaaagaaaagaagagagtgattttgttctacagcttcagattccgggagaaacacagatcccgggaacaaatttgaaaatctgctgtacaatcagcggtgaaaatgagaagaattcagcaaaagagataccacaaaaaagctacacgaaatgctttgattatgatataataaaaagcagtctctgtgtgagatacagacaacccggagattattttacaattgatggggaaggaaagaaaaagaagctgaagaattactttattgatgagaagattccgcaagaagaacgggacagacagcttctgatcgcagagggaagccacatcgtatggattccgggcagaaggatgagttcgtactaccaggtgggagaccagacgaaaaagattcttaagataaagattatggaggaatagaacaatggctgagaagattaaagtgttaattacagaggaagaagtagatgcaagaatccgtgaactcggagaaaagatcagtaaagagtatgaaggaaagcagatccatctgatctgtgttctgaaaggtggagtattctttatgtgtgaacttgcaaagagaatcacagttccggtatctatggactttatgtgtgttggaagctatggagacggaacaaaatccagtggtgttgtaagacttgcgaaagatctggatgagtctattgagaataaggaagtattgatcgtggaggatatcattgattccggtaatacactgtattatctgatggatgtacttcgtcagagaaaaccggcaagtctccgtctttgcaccttacttgataaaccagaccgccgcgtgaaagatgtgcacgtagactggacaggatttgagattccggatgagttcgtagttggatacggactggattatgcacagaagtatagaaatcttccatacatcggagtagtagaagtcgcagaatagaaaggaagcaataataaattgaataatgacagaaaaagcagaggtctgagtggggcaacgatcatcagttttgttgtgatccttgttgtggttctgtggatggcgaaccagcttcagatgcatcagcaggagatgacatatacctcctttgtctctgcagtacaggaaaaaaatgtttctgatgtctacatcaatcagaacagtgcagttccgacaggaactgtctctgttacattgaaagatgatggtaatacaaggaaagtgaatgtgtcagatgttgagcaggtagagaagcttctgacagagaatcaggtggagtacaggctttcggatgtaccgaaggattccatgttgacaacagttgtagttccgatgctgatcacacttggtggagtatttctgatctttttcctgatgagccgtcagaatggcggggggaattcaaaggcgatgaactttggaaagagccgcgcaaagatgagcacgaagaatgagatcaaggttacatttcgtgatgttgcaggattgagagaagagaaggaagaactggaagaaatcgtagattttctgaaagatccgaagaaatacatccaggttggagcacgtatcccgaaaggtgttcttttagaaggacctccgggaaccggtaagacacttcttgcaaaggctgtggccggtgaggcaggagtaccatttttcagcatttcgggttcagattttgttgagatgtttgttggcgtgggtgcttcccgtgtccgtgatctgttccaggatgcgaaaaagaacgcaccatgtatcatatttattgatgagatcgatgcagttgcaagacgccgtggaagcggtcttggaggtggacatgatgagcgcgagcagaccctgaaccagctccttgtagagatggatggatttggtgtaaatgaaggcattatcgtaatggcagcgacaaaccgtaaggatattctggatcctgcaatcttaagaccgggaagatttgaccgtgatgttattgtcggacgtccggatgtaggcggcagagaagagattctgaaagttcatgcgagaaataagccgcttggagatgatgtggatctgaagcagattgcccagacaacggcaggattttcaggagcagatcttgagaatcttctcaatgaggctgcaattctggcagcgaaggagaaccgggtgtacattcagcagtctgatatccgtcatgcatttgtgaaggtcggaatcggtccggagaagaagagccgtatcgtatctgagaaagaacgcaggattacagcttatcatgaagccggacatgcgatcttgttccatctgcttccggatgtgggaccggtttacagcgtatctatcattccgacaggtggagccggcggatatacaatgccgcttccggagaaggatgatatgttcaatacaaaggggcatatgcttcaggaaattacagtttcccttggcggacgtgttgcagaagaagagatttttgatgatatcacaacgggagcttcccaggatatcaagcaggcaacagcaattgcaaaatcaatgatcacgaagttcggtatgtctgaaagactgggactgatcaattatgataatgacagcgatgaagtattcattggacgtgatttcggtcatacatcaagagggtatggcgaaaaagtggccggaacgattgatgaagaagtgaaacgtattattgatgagtgttatttgaaagcgcgtacacttattcaggagtatcatccggtactcgagaagtgtgcacaactgcttcttgagaaggaaaagataacaagaagtgaattcgaagcactgtttgcagacagtgaggttgaaggatagtagttattatatgtatttaggataagataccctctgccggcgggcaatcccgtgttggccgggggtgttcttattttagatagttttaagaattgagttaaaggaggctaaacaggtgaatagagaagcactgttttgtgacggtacaggtgattatgtctgtccggcagagcctgagataaatgaaaaagtagtgttgcgatttcgtacggcacacaatgatgttgatgaagtgaaactgcacatcggagaacaggagtatcctatgtggaagacacgtacggatggtgaatttgacttttacgagatcgagtatcagcttggtgaggatatcttaagatattgttttgaaatcaagcagggagcagagatctgtttttatagtaggtatggaataacaggaaaaaaagaaaactattacgattttattatttcgccgggatttaagacacccgagtgggcgaaaggtgctgtgatgtaccaaatcttcgttgatcgtttttgtaatggagatccgacaaatgatgtagaggataatgaatatatttatattggggcaccgagccgcaaggtgaaggactggaatcaggcaccggaagcaatggatatccgtaatttttacggcggggatttacagggtgttttagataagctggattatctgcaggatcttggagttgaagttatttacttcaatccgttgtttgtttctccatcgaatcataagtatgatattcaggattatgattacatagatccgcattatggaaagattgttgtggatgacggagaagtacttccggtaggtgcaaaggataatatccatgcgacaaagtatcagcaacgcacaggagatatccgtaaccttgaggcaagtaatcagctgtttatcaaactggtagaagagatgcataagcgtggaatgcgtgtaattctggatggtgtattcaatcattgtggttcttttaataaatggatggacagagaacgtatctatgagccgcagccggactatccgaagggagcatatgtaagtaaagaaagtccatataacagctttttcctgttccatgatgcgagaaatgagctctggccttataacggaacatatgatggctggtggggacatgatacactgccaaagctcgattatgaggattcaccacagcttgagcagtacattatggatatcggaagaaaatgggtatcaccgccgtataacgtagacggatggcgtcttgatgttgcggcggaccttggattcagtaatgaatacaaccatatcttctggaagcgattccgaaaggaagttaaggatgcgaatccggatgcaattatattagcagaacattatggagatccgcaggactggctccagggagatgagtgggacagcgttatgaattatgacgcatttatggaaccgctgacctggtttttgactggtatggagaagcatagtgatgaatatcgtcaggatctgtgtggaaatgctgataactttgtcggaacgatgcgtcattttatggcaagtatgctgacaccatctcttcaggtggcaatgaatgaactttccaaccatgaccattctcgtttcctgacacgtacgaaccacaaggcaggacgcgtggcacagcttggaacagaagcagctgaaaaggatgtgaataaggcaatcttacgagaagcggttattatgcagatgacctggatcggtgcgccgacaatttattatggtgatgaggcaggactttgtggattcaccgatccggataaccggagaactttcccatgggggaacgaagacaaagaacttcaggcattccacaaagaagtgatccgtatccacaaggaagagaagccgttgaaaaagggttctatcaagctattggcttcggatgaaaatctgctggcctatggaagatttgaagcagatgaacagattgtcattgttgtgaataacagtgatgaacttcgtacagtgaccgtaccggtatggtatgcaggtgtagagatggaaggacggatgaaacgactgatctactcttatgaaaacggttatacgacagaatatgatgagtatatcgtacaagatggagagattgtcctgaatatgggatctcattcagcaatcgtattaaagccggcagaagcattgagattgatgccgtaagaagtggaacggtattttgcagataaagaaagagtattatacgagaataataaaaatacgggatgagcagttttaatatctgttcatcccgtatttgttattatcattattttgtcagaacctctgccccattctctgtgataagtaccatgtactcaatctgggcagaaagaccatcatccattgtataaacagtccagtcattgtcctcgtctacgaagaagtcaggactaccttcgttgatcataggttcgattgtgaacatcatacctggaacgagaagcatctcacttccctttggtgtcacatagctgacaaaaggatcctcatggaattccagtccgactccatgtccaccgatatcttctacgacagagtatccatttgcacgggcatgtgtattgatcgcatctgcgatatcacctaaatgtccccaaggcttcgcagcctcaagtccaagcttcacacactcttctgtgacacggacgatgcgctctgcacgttcagatacttttcccatcttgaacatacgggatgcatcagaaaaatatccgtcaagaatagtggatacgtcaacattgataatatcgccttcttccagaatgatattctcatccgggataccatggcagatctcgttgttaatagaagtacacacgctctttgggaatccctgataattaagcggagccgggataccaccgtgttcttttgtgaatcgatatacgatgtcatcgatctcctgtgtactcattccaacgtggatctgtcttgctacttcatccaggatcgctgtattaagctcagcactttttctgatcttttcaatctggaatggagtttttaaaatcttacgtgtcggaacaatctcaccacgttcagcatgcatcattatcttttcttcgatcggcatatggcatttcttatattttttgccgctgccgcaccagcacaattcatttctttccatgatattacctcttctaaaaatcacttattttctcggtttctacttattttatcacaaaattcgacaaaaagatacatgttatgcttgccgagaacgtaaaaatatagtacgattaagattcagataggagtgataatgtatatgtggtattgggcgattatggtactgctgattttaggaagtatcgcacttctttgcagtacatttataagtgtaaaaaagaataaggcacaggacgcagagcggagaaagcagtccaagaaaggaaagcgtaacaaggcagatcagggatatgatccagaagaggatcagccgcagggaaagaagagacgcagttcagggcagaacggttctatggattcagcgaagcgttcttctaaaaagagaagacagtggaagattatcctggaagatctggatacatggcagaagtatagcttcatattctatgacgaagtaggaatcggaagagcaaagcggaatgacaattatgagaagtatctgccactgcatgaggatggaagagtatccaagcagcattgtgtgatcatacagagaggtgactgtttgtatctgatggatgatggttccaagaacggaacatacctgaacggaattctggtagattgtccgacagagattcagagagaagatgtgatcggcgttggggagaccagactggagattctcagaatcctaagagaaagtgaataatgaaattacaggcaaggaagtccggcggaaaagtcaggacttctttttctttttgatcgtaaaatgaagaatctgtgtgaaagtaacagttgagtaaggaagatcatatagtagttatatagttactgtcagtgggagtgagcaacatgtaccagaaattgccttattatatggcctatccgatacagacagaatatgatgagaaagcggaaaggacagacctggagtatatgaaaagcctatatccggatcttccaaagagaatactgccttatgtcgaagtggaatgtgacaggatggaatacacggggagtgtgatgtttgatgtttatccggataaattgcagctacgcatcatgtgcaacagaatttgcgaaaatgtaaaaaaacaggagaaaatgtttgccggggaagaacggatgttaagaaatctggcggaagtcctgttgtatcaggaaatctaccgacgcaggggcgaacagagaaaaaggaaacaaaaaatttacagttattgttcattgccaggaaaatctgtgatataatcattcagattacaacgaaagaaacggattcagaagaagggaacagatacaaatgaaaagtaatcttatatttatcggtatgccggctgtcggaaaaagtacagttggtattgtagtagcaaaaagacttggaaaaggtttcatagattcagatcttctgattcaggaacaagaaggaaagcttctgcgtgaaattatagcagaagtcggtgatgatgggtttttaaaaatcgaaaatcaggtaaatcgtgatataaaggcagaaaatgcggttatttctccgggcggaagtgttgtctattgcgaggaagcaatgaaacatttcaaagaaatcggaattgttgtatatcttcatgcttcttatcagacaataaagagaaggatcaggaatcctcaaaaaagaggagttgttttgagggacggtcagacattaaaagacctgtatgacgagcgaaaagtcctttttgagaagtatgcagatgtgacaatcagtgaagaaggctgtcagattgaagaaacaatagaaaatgtacttaatgttattgaggattactctcaaaataaagcgtgaatattaccgtcatagaaaaaggggattccacaatgaaagattttgtgttatagttatgtatggattatattgtaattaaggtagaaaattcttttcgtatagacaaagacacaagaataaatcgttactgaacacaggatctgtgggaagtaatacagaatcggacaattgaggtgcaaaatggagcaatatattattaagggtggtaatccgctggttggggaagttgaaatcggcggagctaagaatgcggcacttggaattcttgcagctgcaatcatggcagatgaaccggttttgattgagaatcttccggatgtgaatgacattaatgtcatgctggaggcaatcgagggaatcggtgcaatggtacagagaattgacagacatacagtaaagatcaatggaaatacaattggagatttcagtattgattatgactatattaagaagatcagagcgtcttattatttgttaggtgcacttcttggaaaatacaagagagcagaagtagcacttccgggaggatgcaatatcggaagcagaccgatcgatcagcatctgaaaggattccgtgcacttggagcagatgtagacattgagtatggtaagattgttgcagaggcggaagagctgaagggaacacatctttattttgatgttgtaactgtaggtgcgacgatcaatgtgatgatggcagcagctatggctgacggtctcacgatcatggagaatgtagcgaaagagccacacgttgtagatgtagcgaacttcctgaacagcatgggagcaaatatccgtggtgcaggaacagacgtgatcaagatccgtggagtgaagtcactgcacaaggcagagtactccattattccggatcagatcgaagcaggaacatttatgtttgccgctgcggcaacacgcggagatgtgacagtgctcaatgtgattccgaagcatttagatgcaacgatctccaagttggtagatatcggatgtgaagtagaagaatttgatgatgcagtccgcgtagtggctaagggacgtctgacaagtacacaggtgaagacattaccatatccgggatatccgacagatatgcagccacagatcggtgttgtgcttgcacttgcaaagggaacaagtacgatcacagaaagtatctttgagaatcgttttaaatatttagatgagctggcacgtatgggtgcgaatatcaaagttgaaggtaattcagcaacaatcgaaggtgttgagaaatttacggcagcaagagtcagtgcgccggatcttcgtgcaggagctgcgctttgcatcgcaggactcgcaacagaaggaattacgatcgtagatgatattgtttatatccagagaggatacgaacgctttgaagagaaactcagaagtctgggtggaatcatcgagaaagtgtccagtgaaaaagagattcagaaattcaaattaaaagttggctaaaccgaggttactgtttacaacaagctgcggccggcagcgagccgatacagacagaatccgaagaaatatgatgtgagaatgtatgcaggtgtcggaacgaaagttctgatacctgttttcagtttatgtgtcaggaactatggcgtaatggatgatcaggcaggccgaatgaaacagtagcgggatatcaataagaaaacagcaggagcaacaaacgatgaatgaatttgaacaggcagaagaacggagaaaaagacagagagaagaaatcaaacaaaagaggatcagacagctcagacgaagaatgacgatttccggctgtattttgttgtgcataatcatagcgctggcagcctttgcagtcaatgtggctaagaaaaagaaattggcagcagaacagaaaaaacagctggaacaggaaattgcacagatgaatgaatcgctgaatgattgctacaacactttcctgacggataatggaatgtcagcggaaaagtcggatgttacagcatttacgaaatggctggaaaagaaccattctgaagagatggatgatttatttctggtctatcagaagaataaaaagataacagcgcaggatatttatgattcctttggagcaactttgcatgttctgtcagatacatacgaaggaaaattaaaggatgaagctaccgctgcgaagaatcatatctatgagaagaaggcagcagagaacggaactgtgcagattacggcagcaggagacctctgtctggaggaagacggatatgttcttgattattatgatacggtaaatgacttgtcaaaatgcatttccaagacaattctgaatcagacaaatgcagcagatcttttcttcctgaatcatgaatattgtgtcagtgaccgtggaaccccgctggaggataagtattatgtattccgtgcaaaaccggaacgtatgaagttgctggaacagatggggacagatattgtttcaattgcgaataatcacatttatgattatggtgcagatgcgatggatgatacgattgatctgttggatcaggcgaagatcaatcatgtaggaggcggaacgaatctggatgaggcaaagcagccgacttattatattatcaatggaattaagatcggatttgtggcagcttccgagggagaacagtataaatttacaccggaagcaacagattcaacgacaggtattcttgcatcttacgacacaacagagtataatcaggtgatcgctgatgcatcaaaagaatgtgattatctgatcgcatatgttcattggggaacagaagatgaggatatgtacaattcgacgcagacagagcatggaaaagaattcctgaagtcaggagcagatatcgtgatcggaggtcatccgcacgtacttcagggaattgagtacacagaggatggacctattgtatacagtctaggagatttctggtttaatgatgagacaaaatatacaggacttctgaatcttgagattacatcagagggactgaaacagatgtctttcatgccgtgtgagcagaaagacagccagacacagtatctgaataatgcagaatcccagagagcactttttgatcacttgcaggagatttcaccgaatattacaattgatgatacaggtgtgatcactgagttgaaagatgttgatgcagaatcatagaaatataaaagttttatcaacttcagaaaacggtattgacataatcaacaaggtgttgtatagtctgatacgaaacaaaattaaataaatgatactttctcttattcagagcagtggagatacaaaggatctaagaagctgcggcaacccctcgtaataggaaggtgccaacctgagcgagttatttcgaacaataagaggattgttaagataaactgacagtccgcttgatgcgggctgttttcattattggcaatgtaagcaaatgaagacagcacaagcgagagaaagtgagaagttgctgttagtgcagcaaccggaaaggagaacagatatggaaagagaaaagattttatttacatcagaatcagtaactgagggacacccggataagatgtgtgaccagatttcagatgcgatccttgatgaactgatgagacaggacccgatgagccgtgtggcatgtgagacatgctgtacaacaggtcttgtaatggttatgggagagattacaacacaggcatatgtagatatccagaagatcgttcgtgacacagttcgcgagatcggatatacaagaggaaaatatggatttgacgctgatacatgtggcgtgatcacaacactggatgagcagtcagcagatatcgcactcggagtagacaaagcacttgaggcgaaagagaacaagatgtcagatgaagacattgaagcgatcggagcaggagaccagggtatgatgttcggttatgcttctgacgagacagaagaatatatgccatacccggttgcaatggctcataagcttgctcttcagctgacaaaggttcgtaaagacggaacgcttacttaccttcgtccggatggaaagacacaggttacagtagagtacaacgaagacggttctgtaaagcgtctggatgcagttgttctttctacacagcatgacccggatgtgactcaggagcagattcatgaagatattaagaaatatgtattcgatgagattattccggcagaactcgtagacgaagagactaagttcttcataaatccgacaggacgttttgtaatcggtggaccacacggagacagcggactgacaggacgtaagatcatcgttgacacttacggtggaatggctcgtcacggtggcggtgctttctccggaaaggactgtacaaaggtagaccgttctgcagcttatgcagcacgttatgcagcaaagaatgttgtagcagcaggacttgctaagaaatgtgagattcagctttcttatgcaatcggtgttgcacagccgacatctatcgcagttgatacattcggaacaggaaaactttctgatacaaaactggttgagatccttcgtgagaactttgatttccgtccggcaggaatcatcaagatgctggatctgagaagaccgatctacaaacagacagcagcttacggacattttggacgcaacgacctggatcttccatgggagaagctggacaaggttgacgatttaaagaaatatctgtaagatagaaatatctgatacaagcaccggaaggtgcctgacacccgtcataaagtgtcaggcacctttttcaatacggaaaggagatgcttctatgaaattacgtaccaaactgattattgcttttgtagtcgttatgatctttcctgtaacatttgcactgatcgcaatgcatgcatttgttccgggaagaggggcagagatacagcagctgtatctgatcgcagttgtccttacgacagcatttctaatcttgtggatctacagatcggtatcggtcccgctggagaaacttcagagagctgcacgcaatatcaaagagggtaatcttgactttgagatcaaggcagaatcaaatgacgagattggacaactctgtcaggactttgaagaaatgcgtctcagactgaaagcacaggcggaagagaaggtcgcatttgacagagagaataaggaactcatcagtaacatttcacatgacctgaagactccgatcacagcgatcaaaggttatgtggaaggaatcatggatggggtagcagatacgccggaaaagatggacagatacatcagaaccatttataataaagctaatgagatgaatcttctgatcaatgaactgacgctttattcaaagatcgatacgaatcgaattccgtataatttcacaacaatctctgcgaagggatattttgcagattgtgcggaggatttaagtgtagaactggaatcaaagggagctgaatttacttacaggaactttatggaagaggacagcaaggtgatcgtagatccggagcagcttcgaagagtcatcaataacatcgtatcaaattctatcaaatatacagataagccaaaggtgaagattacgatggatgtaaaggacgtgggagactttattcaggtagaactgggagataacggaaagggcattgcggcaaaggatctgccgaatatctttgaccgtttctaccggacagatgcttcaaggaattcttccaagggaggaagcggcatcggtctttctatcgtgaagaagattgtggaagagcacggaggaaagatctgggcaaccagcgaagagggcgttggaaccacgatgtattttgtaataagaaaatatcaggaggtacccgtagaagatgagtaaacgtattttaatcgtagaagacgaggaaagcattgcagatcttgagaaagactatttggagctgagtggttttgaagtcgaggttgcgaatgatggtgagataggacttaagaaaggacttgaaggagaatttgatctgatcattctggatctgatgcttccgggagtagatggatttgagatctgtcgtcagatccgcagccagaggaatacaccgatcattatggtttcagcgaagaaagatgatattgataagattcgtgggcttggacttggcgcagatgattatatgacaaaaccgtttagtccaagtgagcttgtagcccgtgtgaaagcacatcttgcaagatatgagagactgatcggaagtaatgtagagcagaatgaagtgatcgagatccgtggattgaagattgacaagacagcacgtcgtgtctgggtgaatggagaagagaagtctttcacaacgaaagaatttgaccttttaactttccttgcaggacatccgaatcatgtgtacagcaaggaagagcttttccgtgagatctgggatatggagtcaatcggagacattgcaactgttacagtacatattaagaagatccgtgagaagattgagtatgatacttcacatccacagtatattgagacaatctggggtgtgggatacagatttaaagtataagaagaaagagaggactctgccagtgaatggtggagttcttttttgtggaaacaataagaatgtcaactcaaacaaaagaatgggttgacattctaaaaagacatggatatactattttcatatgttgtaaataagatcaacagaataataatgcagaagatgcgttgctggtcgcacatcgtgtgaacagtaacgcgttggagatattgttatacttatagaatcagaagaaagggaaatataccatgtcaaacagatcaattcatacattactgaaaaactgggatgaagaatgtccgcttacaagagaagaggcagttgaagtgctgagtcttcctgaagaggagatggacagtctgatggagtgtgcttatgcacttcgtacaaaatacaaagggaagaaagtaagcgttcagcttctgacaaatgttcgtagcggaaactgtacacagaactgtgcttactgtgcacagtccaaggattctcaggcagagatcgagaagtataagagagtatcagatgaaaagctttatggtgataatgatctggtagatgagaaacatcttgcaagacattgtattggattaagtggaatcggattctcagacgaggagattgaagatcttgcagaccgtatccgcgagatgaagaagaaagacacacagatctgctgctccatcggtttcctgacagagaaacaggcaagaatcctgaaagatgccggactggaccgtatcaaccataatctgaacagcagccgttctttctatccggagatttgtacaacacatacttatgatcagcgtgtgaataacatcaagatgcttcagggacttggattcgagatctgcagtggtggaattgttggtatgggagagagtaaggaagatatcgttgatatgctgatggatcttcgtgagatcaatccggagtctgttccaatcaatttccttcttccaattccgggaacaaaactggcagaccgtgatatctctgaactgacacctgaatattgtatgaaggttctttgtctggcgagattgatgattccgaagtctgatatccgctgtgcagcaggaagggaagtttactttaagggaatggaaccggaacttttcaaagttgttgattctatttttgcatcaggttatctgacagccggaggccagggaattgatgatacaatgaaaatgataaaggatgctggatttgatggagaaatcgagtctacagatcactaaaaatgattcaaactatataataattttaaataaaccgccaaacgaaggatacgctgttctgaagatgaatcagagcggcgtatccttcgtttttatcgttttgtcagcttttacttgcggatgataagatggagtggtaacatgatgtttaataattgtcatgtgagagtgaggaaagacaggcatgtatggattttatatagatgaagacaggagaaaagcacgaagagcaaagtggaatacagtgaggatcatatcaatcggattttttggtgtgattcttcttggaagtctgcttttatggcttccgttttcaaatcatcagccaattcgttatatcgacgcactgtttacggctgtaacctgcgtctgtgtgacaggattggtgacagttgtgccggctgcacagtttacagtggcaggaaaagtgatcctgcttattttgattcagattggcggacttggaatcattgcatgtacaactgcatttttaattttggttggaaagagaataaacatgaaggaacgagttgtcattcaggaagcctatggtctgtccacacttcaaggaatgatccggtttattgaaagagtattgtggggaacatttcttgtagaaggaattggcgcaatcggatattcattacagtttattccggagtatggtgttgcgaagggaatcttctattccgtgtttcactcaatctctgcattttgtaatgcgggtgtagatattcttggagattcaagctttacgagatatgtcaatacaccggtgatcacaattacgacaacaatgcttgtcattctcagtggacttggttatccggtctggatcgatctggcgaagaatataaagatgacaatacagtccaagggaaaacgtccggtcggaagaacgatcacaaggctgagtcttcagagcaagatcgtcttgacaatgacgttgttccttcttactttgggaacagtaggattctatctgttggagcatcataatccggcaacgatgggaacattgaacgctgcagggaaattccaggcggcttttttccagtctgtgacgacgaggacagcgggatttgcaagtatatcccagtcaggtcttacgaatggttcaaagctgctggcctgcatgctgatgatcatcggtggttcaccggcaggaactgcaggtggtattaagacaacaacagttgctgttctcttgcttacagcaatttctgtcttgagaggaaacaaagatacggaatgttatgggagaaaaattacattcgaaattataagagtagggatgacgatcacacttgtgacatttgtcttctggctgtttggagttacggtgatgacagtgatcgagccacagcagaaagtccttgatctgatgtttgaggcgacatctgcgatggcaacggttggtctgacagcggatctgacgccggtgcttagtgatatcagtcatgttgtactgatgctcatgatgtatattggacgaatcggaccaatgacgatggcacttatattttccggtcatgcggacaagaagaaccagttccgtactctgccggaagcaaagatcatggttggataagaaaagataaaagagaagataagagatacgcgataaagataagaaacagtatatgagaaggagaaaacgatgagaaagcagtttgcagttcttgggcttggaagttttggacggagtgtggccctgacacttgagagtatgggatgcgatgtgatcgttgtagataaatcacaggagacgatccaggagatcgcggacagagtgacctatgcgatcacagcggatattacagagaaagaggcattgagcgcacttggaacaaggaatctggacggagcaattattggagttgcggaaaatcttgaagcagggatcatggcgactctgctttgcaaagaaataggaattccaatggttgttgccaaagccaagaataagttacaaggaactatattgaagaaggttggggcggatactgttgtatatccggagattgagatgggtagcagggttgccaaaagccttttggcgacagaattcacagactggatcgaactgtcaaatgattacagtatggttgagatcgctgttccaaaaccgtggatcaatcacagtatggcagaactgggaatccgtacgaaatatggagttacagttgtaggaatcatgcagaacggaaatgttaatgtagagattgatccacagatgccgcttccggagaatgcgctactgattctggttggggcgaacaaagtactcgaaaaaattggaaaattggagaaatagattatgataataagtacatcgaatgcacagatcaaagaactggcgaagctgcagaagaagagccgcttaagagacgagaaaggaatcttcctggtagaaggaccaagaatgacagaagagattccggcagaacgaattgagaaggtgtatgcttcagaaagctttgcaaagaagaataaagaatttttggagagattacaggcaccggtcgagcttctgacagatactgtgttcgcttatgtgtcagatacaaagacaccgcaggggattctggcaattgtaaagagactcgattatacaatgaaagatttaatgcaggtaaaagaccagaaggcaccacatttgatcgtgctggataatctgcaggatccgggaaatctcggaactattttcagaacagctgaagcagcaggtgtaaccggaatcttattaagcaaagactgcgtggatgtctacaatccaaaggtaatccgttccacaatgggagctgtatttcgtatgccgttcctctatgtggaagatcttccggggaagatcaaagaactgcagaatgatggcattaaagcttatgcagcacatttgcatggaaaaaatgcatacgacgaggaagactatacaacaggctgtgcatttttgatcggaaatgaaggaaacggacttcgtgatgaagttgcagactgcgcggattgtctcatccgtatcccaatggaaggcgaggcggaatctctaaatgcggcagtggcagcggcggttctgatgttcgaagcaggaagacagagaagaaagaaataataaaaatgcataaaagaatgtataagtactgaataaatatgtataaaacagagtaaaataaagttttggttgcatttttatacatgaatgtagtatactaaattcataggttacaatgtaggttcaaagatatgaagaagagaaggacagagagggttctgattcatatagttatagaatagaaaggacgagaactatggatttaaaaggaagaaattttctgacactgaaggattttacaccggaagagattacatacctgcttgacctggcagcagacctcaaagagaagaagaaaaacggagtaccggtggatcattatcatggcaagaacattgcactgatttttgagaaaacaagtacaagaacacgttgtgcattcgaagtggcagcgcatgatatgggaatgggaacaacttatcttgatccatcaggttctcagattggaaagaaagagagcatcgaagatacagcccgtgtacttggaagaatgtatgacggaatcgaatatcgtggattcggtcaggaaatcgtagaagatcttgcaaaatatgcaggagtaccggtatggaacggtctgacaaacgaatatcatccgacacagatgctggcggatatgctgacaatccgtgagaatttcggagaactcaaaggccgcaagcttgtatacatgggagatgcaagatttaacatgggcaattccctgatgatcgcatgctctaagcttggaatgtatttcgtagcatgtacaacgaaagaatatttcccgaatgaagagcttgttgaaacttgtaaaggttatgctgcacagtccggagcaacaattactctgacagaagatgtaaaagaaggaacaaaggacgcagatgttatctatacagatgtatgggtatccatgggcgagccggacgaagtatgggagaagagaatcaaagaactttcaccatataaggtaacaaaagaagttatggcaaatgcaaaagatacagctattttcctgcattgcctgccggcattccatgacctgaagacaaagatcggagctgagatgggacagcgtttcggaatcgaagatatggaagtaacagacgaagtattcgagtctgcacagtccaaagtattcgatgaggcagagaacagaatgcatacgatcaaggcggtaatggttgcaacacttggtgagttctaagagcatgtaatctatttgatgaacttgagaaatcagcagaagtttggtatgataaatgagttgaagatcagaccggcttctgtggaaaataagaatgagcagaaggtgtctgttattccagagatgggacagacacctttcttttgtataaaggtctgatgagaggtggaattagaatgaaagctgaaatattaaaattattgagggaagcggacggatatgtgtcaggccagcagctttgtgaaaagttcggggtgtcaagaactgcagtctggaaggtgatccgtcagctgcaggaagaaggatatcaggttgaagctgtgcgcaataaaggttatcatattgtagatagtccggatgtgatgacgaaggaagagctcgacagcctgatggatacgcagtgggcaggaagaaatatcgtttattacgattcagtagattctacaaatctgaggatcaagcagatgggagatgaaggtgtaccggaaggtacacttgcggtagcagataagcagacagccggaagaggaagaagaggccgttcctgggattcaccgtcaggttccagtatttatatgtccttgttgcttcgcccggagattgaaccggatcaggcgccgatgctgacgcttgtgatggcattaagtgtagcagagggaatcatggattgcggagattcctgtggaaacccggatgtaaagatcaagtggccaaatgatattatcattaacggaaagaaacttgtcggaatcctgacagagatgagcacccagatcgattacattaaccatgtgacaattggtgttgggatcaatgtgaatctgacagagttcccggaggagatacgtgagacagcgacatcacttagactggaatgcggacatgtggtaaagagagcaccgttgatcgcagcagtgatgaaacgctttgaacagaattacactgtttttcttgaacatggagatctgtctggtctgaaagaacgttacagcgaattactggttaataaagaccgtgaggtccggattcttggtgcgaaagaacagtacaatgcttacgcacttggaatcaaccagacaggagagctgatcgttcggaaagaagacggaaccgaagaagcggtgtatgccggagaagtttcggtgcgtggcgtatatggatatgtataaccttgtggataagaactgcggaatgtgaataagtcattgggattatgcagtgaatgtggaaaatatggaaaggtaagtactgtttacaggaactgtggacagtgatattataaggtgtaaaaattatggatgaagaaatggtattgtgtgcggccagctcctatgagcagaaatattatctgaatccggagtttgagtctcttccggaagcagtgaaacaggaattgcagattatgtgtgttctgtatacagcagatgttggaggagttcttctgctggtgtttgatgagaatggaaaccttgagttgaaagtagagcacaacgagggtgatttctcatttgatgagatcggaagtgtcttgaagatcaaagaattgcagaatacaaaggaagaattatttaagtctcttgaaatgttttacaaagtattctatcttggagaagagatggaagaagagacagaggaataaatagtcagataaatagattacggtttatctgtcgaattttaaaactataaaaaagcccatggcggaatctgaatgataagtttgttgaacttatcagaattcctgccatgggcttttgcttttaacttctgtttaacgacaggtcactttttatccgagcaataacttcagaacgtcgctgacctttttcactggagtgattttcagcttatcctttacttcagcagctacatcttcgagatcatctgcgttgtcaaaaggaatcagtacttttgtaataccggccctctgggcagccatcagtttctcaggaagcccaccgatcggaagtatacctccgcggagggaaacttcaccggtcatggcataatccgggctgacagcctttccagtaacaagggaagcaagtgctgtggttaatgtaatgccggcagatggaccgtcttttggaacagctccttccggcacatgaatgtgcagatcatgatcctgaaaaaccttgctttctttaggataaagagatttcacaagtgtcagtgcaatctgtacagattctttcatgacatctccaagctgtccggtgatgatcacctttccttccccttctgtcagctttgtctctataaacagaatctcaccgccggcctgtgtccatgcaagtccggtgacaacaccaggctgtgcggaagttaatttctggtcatgatgcagtttcttccggccaagatagtctttcagattcgatttatttactgtcagagtctgcccctcttctttcacaagacgcacagcaacagaacgacaaagcatatcgatctgtttcttaagtccacggactccggattccatcgtataatcttcaatgaccctgcgcagtgcaccatccgttatcttcaacattttcttttggattcccatagcgtccattgcctttggaagtaagtgctttctggcaatatggaatttttccacagccgtatatcctggaaaatcgatcacttccatacggttcagaagcggttcaggaatcgtatctgtagaattcgctgtgcagacgaacagaacattggataagtcatatggaacattcatataatgatctgtaaatgtactgttctgctccgggtcaagcacctcaagcaatgcacttgccggatctccgccataatctttcgcaagcttatctacttcatcaagaactacaacaggattggaaacgccgctgcgtttaatcccttccatgatccgtcccggcatagcgccgatataagttcttctgtgaccgcggatctcagcttcatctcggataccgccgagactgatgcggacatattcgcggtttaacgcacgggcaatactctgtccgatacttgtcttaccggtaccaggcgcaccgacaaaaaggaggatggaaccatactgtttccggttcagtgccataacagcaatctgctggatgatacgttctttgactttcttgagtccataatgatcttcatcaagaatcttttctgcccggtttaaatcaatcggtgtaaattccggatgcttccaggaaagactggtgacaaaatcaagatagtcatagagaagcccatattcatggctgtcttttccttcctgcttcatacgattcaggactttgtccgcttccttacgggcatcttcgttcatgctggattcctggatctttttttcaaaagcacggacatcggaaatgttttccgggtgcatctcatctaattctttctgaaggtaatcaatctgcttcttaattgcagcctctctgtaaagctgctcctggtcacctttctgtgcctcctgtgcttcagaagaaactttggccacttccatgaattctttaatcgcattctcaatcagttcacagcgctcacggcgggaatctgtctcaacaattgcatatttttcttcggaagtaatgttcagataatctgaaagagcagaaccgagatcatagatattctttctttggataatgtagcttcttgcccagatcccccattgataattctgaacaaatttcagaagcgagttccgcaggtttgtgaaagtctgcttctcttcttctaaaggaagatcatttacctccgggcggatggaagctgtagctgtaatctgtccgttctcatccagctcaatatcatcaaggctgacacgttctaatgtacgaatctggatgctgtcatcatcactgatggattcgactctcgcagacataccgaccgggtaaatatcgtctatagtaacagtagtctcatccacttcatttttcaaaaatggaaacagaatatctgtaccgacttcaatctggtctgcagcagcccccggaaagaaatcacgtttaaaaaaataagtgatatcagggagcaataatatattaaaaacaggacgaataatcataaaaacactcctttcgtctcatgatttatcatatcaccgtcagcgattcaaaatggtgggatatgttgtgtaatgcaggtgccgcgaacagaaaactgcttacagctgtgccatcagaaagtttagcgatcccgcaggattctcagttcctttttccaaaagagagacaagagcagagattgtctgttcaatctcatctgctgttgaaggtactaaggtgttatccatcttaacagtcagtacaatcagtacgatttcagcaagagaaacagggtcagcacagcggattaaatcctgtgcaatcccttgttcaataatggaagcaagaaccggcttgagtgaaacgatgagatgattcatgtacttttgatgaagaaaagcccgctccggtgcagcctttgtagttgatggctgggtctttaaaaaagccgcagaggaatttcggcaagcctgaaagatcagagccatgcgtgtgaaaggtgaaatctctctttgctctgcaagatgtcttgctgttgttattggagcttcataattgcgttctaccagtgcttcaagaattgcatctttggaagaaaaataataataaatacttccttttccaatttcagcagtctgagcaatctcactgacagagatattagaaagttctttggtttccagaagcttttgaagagcatctagaattttatcgtattttaattgttttggcatagaagtccgcctcgtatattcgtaagtatatttggccagttccagattacgggaattgaccgatatccttttaagtatagcacaataaagtcggaagaaccaataaaatagaaataaaaaagaggacaaaaaaaggacactttgaaacaaaagattgtctgaaatagataattgaccgtgagtcgaaaaagtgatagattaaaaacatagcaaatcgaccaccggtcgaaaaatgaaggactgaaaaggaaagggagagaaaaatgacatacgcagacatgttttcaaaagtaaaaggaatgatgatggaagcagacgtaagtactgtgaatgaacatcttgcatatcagttcaatgtaacaggagaagcagagggaatcttttatgcagaggtaaaagagggaaagctgtatgtggaaccatacgagtattatgacagagatgcgatttttacttgttcggcagagacattatttaagatcaacgagggaaagctggatccggttctggcagtaacactgggaaaattgaaagtagaaggtaacattgacaaagctttgtatctgaaaaaactgattgatagcagaaaagcagaacagaatgcaataaagaaaacacagaaacagaaataactgtaaaaaggaagcaaaggtgaaaaagatgatgcattacggaaaacttcttgcacttgcaggtctggtgggaatcgtatcagcagaggcaggtggaagtgcatacttttacagaagaacaatgatgcgttataacgcaaagacagaacgcacgatgaagatgtccggggtagactgggatcagtatttctcaaagatgaaggaatgcagggagtggatgatggagcagcctcatgaagatgtctggatccggtcggaagacagtttgaagcttcatggaacgtatttccagggagcaggaaatgtcgaagaaaagaaatgcaaaaaagcagtgatctgttttcatggctacacgagtcaggggcttgcagattatggaagtatttcaaattattatttgaagcgtggttataacgttcttcttgtcgatcagagatcgcatgggcaaagtgaagggaaatacattggattcggatgtaaggaccgttatgatgcatatcgatggattgaatgggtgattggacaggaaggagaaaatgttcagattctcctgcatggtaattctatgggaggcgctacagtattgatggcaagcgggcttgatctgccgcagcaggtaaaaggaattattgcagattgtccgtttacttcgcccaaggcagtgtttacacatgtacttcacagtatgtatcatcttccggcgtttccaataatacagattgcggatgcggtaaataaaagacaggcaggatacggactggatgagtgcaattctgcccgtgaagtcagaaaagcgaaggttccggttcttttgatccatggagacgcagatacatttgttccgtgcagcatgtcggaagaaatctataaaaactgtaaatctccaaaacagaagctgatcatccacggggcaggacactgcgaaagttattataaagacagagacgcttatgaaggagcaatggattcatttataggaggaatcatagaatgatgaaaacaagaaaaggatatcctgtatacccactgacggtagcgcaaaaatttcatttgtattatctgccattttgtccgaatgcggcagtactgaatattggcacaagcctgacaattggcacagatctggatcgggatgtactccgagagtccatttacaaagcatatgagagaaatgaagggatgcggatacgctttgcaaaggacaaagaggggaatgtatatcagtatgttgtaagtgcagagcaggacagacaagaacgggagatagagttcgttgatttctccaatgtgactatggaagaggcagctgatacgatgcagaaatggacaacagttccattcccactcgaggattcaccgatgacgaagattaaaatgatccgcacttcagatggattcaacggagtgtatttcctcggacatcatatggtggtagatgcccagtcactgatcacatttctgaaggatattattgagctgtactgtaatgcaaaatacgaaggtgtcccatatccaaaggatatgtgttcttacatagatcaggtaaagaaggatctcgcctatgaagccggaagtaaagcacagcagcgagacagagaatttttcagggaactgattgaagcatcagagccggtttataacggtgttaatggaacagataagttggatgcagcgagggaaatgtttaaaaatccaaagcttcgttctgcatttaatgcgacagatgatgtgagttctgcattggatatctttcatttggaagcagaaccgaccaaacgtctgatggatttttgcgaaaagtaccgggtatctctggcatgtcttttgttgatgggattacgtacttacttccagaaaatgaatggacaggaggatgtatcgatcaataatgcgattgccagaagagctacattaaaggaaaagaaatccggtggaacaagaattcattcgttcccgtttcgtaccgtattttcagaagatgtgaagtttattgatgcagtatatgaaatccgtgataagcagaatgaattattccgtcatgcaaattatgacccgacagaatatttcgcatatcgctccaggacatatccacagccacagaaaggactgacgtatgagccgatgtctttgacttaccagccgatgacattgcaggagaaaggactggaagatcttggaggaattcaatataagacaaaatggtatccgaatggaatgacaacacaggcaatgtatctgacagtcatgcatcgaccagaggataatggattggatttcaactttgaacatcagaaaaaagcaatctcaagagaagagctggaatatctgtattattatttatgtaaaattatgttcaagggagcagaaaatcctgaacttacaattggagaaattataaagcttgtataaaagaaagatgatccggatcatgttgagaatcacgatcaggacagaatggaaaggaaaaaatcatgtttgagcagttagtagatattatttgtaattatgtagaaattgaacaggaaaatatcaagccggaatcacgttttatggaagatcttggattcacatcctttgattttatgagcatgcttggggaaatagaagatgagatggatgtggagattgaacaggacaaggcagcaggtatccgaacagtcggagaagctgtagcgtatcttgagtctttgaagtagagggaaaagaaaatggaatatagaacaattcgcgatattcttacaaatgcagaaaaatgttttggaaatgaagacgcaatccgttacaaaataggaaaaaatgaaattgcggcaaagacatacacacagttgaaagaagacagtgagagaataacagcattattgaaaaaactgggagacccaaaaagtcatatcgcattgatcggtgcgacttcttatctatggattgcttcctattttgggattgtggacggcggaaatgttgcagtaccgttggatgtgtcacttccggcagaagaactgtgtgaacttatcgaccgtgcagatgtaacaatcctgattctggatgagattcgtaaagatgtgatcgaagcagcgaaagaaaagtgtccaaaactgaagtacatcctttctatgcagaaggaagcaaatgagggcaatatactttctcttacaaaatcaatgatggaacaaacgatagatgaggacacaggagtagaaaaaacagagattactccggatcaactttgtacgatcatgttcacatcagggacaacaggaaagagcaaaggtgtgatgctgacacatagaaatctcgttgagaacgcgacatgtctggatatgaagctcccagagagaaatgtgctcctgtcagttttaccgattcaccacgcatactgcctgagtatggatatcctgaaaggaatttctctcggtgcaattatttgtatcaatgactctttgatgcgtgtggcgaaaaatatcaaattatttaagccgaatatgatcctgatggtaccgcttatgattgaaacttttgcgaaaaaattagaagacgtaaaagaccttccggaaaaagtggtaaaagaagcagtatttggatctcagttccatacgatctgcagtggaggggcatacctgaatccggagtatattgagctgttcgaacgttttggaatccagattctccagggatatggaatgacagaatgttcaccggtcatcagtacaaatgttgcatggaatgtaaaaaagaattcagtaggacaacttcttccaaactgcgaggcaaagaccgtagatggagaactgtgggttcgtggaagcagtgtaatgcaaggatattacaagatgccggaagaaacaaaaaccgcactgaaagatggatggctttgcacaggagatcttggatatgtagatgaagaacggtttatatatctgacaggacgaaagaagaacctgatcattacaaagaatggagaaaatgtctcaccggaagaactggagaataaattaagttcttcaagactggtgcaggaagtagtagtaagagaagcaaaaggagtgatcgaggcagaaatatatccggatgaggagtacgcaaaaaagcagggacttgaaagagaagaggaagtccgtgtagaactccaaaaactgattgatgaatacaatcagggtgcaccggcgtataaaaagatttatagtctgatcattcgcgagaaagaatttgagaagacagcttcaagaaaaatcaagagatattaaaagacagataaaaaagtctgaataaacggagggttgcaaaagctttgtgattgccggatttattcggacttttttgtatgaatgcgaaagaacagatcatgtacgttgacttttcggcagttatttactatgatactaaagtcaaataagaagaatagttatagattagaaagaatagaatatgatgaaacagttgaaaataggaaatgtgacgctgccaaaccgctatatcttaggtccgatggccggagtgacagatcttccattccgtgtgttatgcaaagaacagggagcaggtcttttgtgtatggagatggtcagcgcaaaagcgattttatacaataataagaatacagagtcacttttggagatccatccggatgaacagccggtgtcacttcagttttttggatcagatccgaagattatgagtgagatggcaaaacgtgtggaagagcgtccgtttgatatcatggatattaatatgggatgtccggtgccgaaggttgtgcgtaacggggaaggctctgcacttatgaagaatccgaagctggtttatgaaatcgtcagtgcaatggtgaaggcgattgataagccggtcactgtgaagataagaaaaggatttgatgacagctgcattaatgcggttgagatcgcgaagatcatcgaggaggccggggcagcagctgtagccgtgcacggaaggacaagagaacagtattacagcggacaggcagattgggatatcatccgtcaggtgaaagaggcggtctctattccggtaattggaaatggagatgtgacaagtccgcagaaagcagaagagctggtaaaacagacaggatgtgacggaatcatgatcgcaagaggagcacagggaaatccatggattttctccgagatgatcacatatgaagagacaggcgtgctgccggaacgtccgagtctggaagagattcgtgatatgatgctccgccatgccagattacagctgaaatacaaaggtgaattcattggaatccgtgagatgagaaaacatgtggcctggtatacgaaaggactgaaaggctctgcaaaattacgcgaagaaatcaaccgtgtagagtcctatcaggaactggaagaactgctctttcaacttgacagaaagcgctagtttgagtataatattgaaattgcggacggacgctgatgagggcattggcgtcagtgaaaaaagacagcaatcgtgcattttgaaaccgataagatctgtagacaaaatatagagaaggaactttgaatgcatgaaaagtatagacagaaaataatttgcagagaatctgtaaatgttataggaaacgagacgttactgccgcagacagtgacggtaaggaagtagaaaggaagcaggaacaatggcagaggcaaaaaaaagattacttacttatgccggattaaaggcaattgaggatgaacttgagaatctgaaagtagtaaagagaaaagaagttgcaggtaagatcaaagaggcaagagagcagggagacctttccgagaacgctgagtatgatgcagcgaaagacgagcagagagatatcgaagcccgtatcgaggagcttgaggcaatcctgaagaatgcagaagttgtagtagaggatgaagttgatcttaataagatcaatgttggatgtgcagtaaaggtttacgacatcacatttgatgaagagatggagttcaagattgttggttctacagaggcgaacagtctggaaggaaagatctccaatgagtctccggtaggtcacgcactgatcggaaagaaaatcaatgatgtcgttgacgttgagacacaggcaggagttatccagtacaaagtacttgatatcaaacgatcataatcagcttaggacagacctcttactattaagaggtctgaattcgcttaaaaagacaatatacaaaataatgcttccaagttgatttatgtaaaaatcgatgcggaagcagatagaaatggaaggagaacagacagtgggacagaatcagaagaacacacaggaaccagatatgaatcagctgagaaaggttcgccgtgagaaacttgcagaactgcagcagaacggaagagaccctttccagattacaaagtttaaccagacacatcattcactcgaagtgaaagatctctatgaggcacatgaggctgagattttaaaagatcaccagcagccgaacgtagaaggtatggatgaagagcaggcaaaagaggctctcaagaatgattacgaagagagaagaagcatcatggatgcaagcccgatccacgtagcaatcgcaggacgtatgatgttcaagagagttatgggaaaagcttctttctgtaacatccaggatttacagggaaatatccaggtatacgtagcaagagatgcaatcggaacagacgcttacgctgatttcaagaaatctgatatcggtgatatcttcggacttgaaggattcgctttcagaacaagaacaggagaaatctccattcatgctgagaagatgacacttctctccaagagcttacagatgcttccggagaagttccacggcctgacagatacagacacacgttatcgtcagagatacgtagacctgatcatgaatgcagactctaaagatacatttatcaaacgttccaagatccttgcagcaatccgtaagtacttaagcggagaaggatttatggaagttgagactccgatgcttgtagcaaatgccggtggagcagctgcaagaccgttcgagacacatttcaacgcactgaacgaggatctgaagcttcgtatttcacttgagctgtacctgaagagactgatcgttggtggacttgagaaagtatacgagatcggacgtgtattccgtaacgaaggtttagatacaagacataacccagagttcactctgatggagctttaccaggcatacacagattaccacggcatgatggatctgacagagaacatgtaccgctttgttgctcaggaagtccttggaacaacacagatcgtttacaaaggaatcccgatggatctcggtaaaccgttcgagcgtatcacaatggttgatgcagttaagaaatatgcaggcgttgactggaatgaagttgagactctggagcaggcaagagaacttgcaaaagagcataatgtagaatttgaagagagacataagaaaggtgacatcctcaacctcttcttcgaggagttcgtagaggagcatctgcttcagccgacattcgttatggatcacccggttgagatctctccactgacaaagaagaaaccagagaatccggaatacgtagagcgtttcgagttcttcatgaatggatgggagatggcaaatgcttactctgagctgaatgacccgatcgatcagagagagcgtttcaaagcgcaggaagaactgcttgcacagggagatgatgaagccaacacaacagatgaagacttcatgaatgcactggagatcggtatgccacctacaggtggtatcggattcggtatcgacagaatgtgtatgttgctgacaggagcagaggcaatcagagatgtgctgctgttcccgacaatgaagtccatcggtggtgtaaaatccgaaaatggtgtaagttctaaagaggtttctacaccaaattcagagcctgagaaaattgatttttctaaggtgaaggttgagcctttgtttgaagaagatgttgattttgatacattttcaaagtcagatttcagagcagttaaggttaaagaatgcgttgctgtaccgaagtcaaagaagctgttgcagtttacccttgatgacggaacagacacagaccgtaccattttaagcggtattcacgcatattacgagccggaagagcttgtaggtaagacacttatcgctatcacaaatcttcctcctcgtgctatgatgggtattgactcttgcggtatgctcctctccgctattcacgaagaagaaggcgaagaaaagcttcatctccttatggtagatgaccatattccggcaggtgcaaagctctattaagaagtaccgttttaccttacaaaacgggatgtacttcatttgtgaaaaagctctgaaaatacacaaatacaccaaatttacaccaaatggtgcttgaaacagtgcagagccttaaaaatcgcatattttaaagatatatgggcagttccattgcggaattgcccattttcagaaagaaaaagataaattggtatttataaaggagaatattgatgaaactatttttatgttcgcacttttcaagtgtgggaagtctgataaaggaagaaattgaaaataagaaagtcgcatttattccaacagcttcactgcgtgaaggctacaccggttatgtcggctcggctcgaaaattattcaaaaagttgggagcaatcgtaactgaaattgatatttcaacggaggcttattcaacgatacagtctgtttttgaagaagcagatgtgatatattttaccggcggaaattctttctttcttatggaccagctccgtaaaacgggaactgatgggctactgaaaaaggaattggcaaatggaaaattgatgatcggcgagtcggcaggcgcaattatatgcgctccaagcatccaatatatcgagcaaatggatgaaaagccagaggactactcacaagaagatgatgcagggcttgatttgattgatttctatgttcttccgcattatcttacagcaccatttaagaaagttaccgagaaaataatgactgagttttcggatttgaatctatgcccgattaacaaccgtcagggaattgtaattgatgttgaaggttcaaaggttatttgcaaagactaatttgaaaattcccatttatcaagccctttgagagaggagaaatcttttctcaaagggctttttctattatggactttagtctgttgagtccattggagtttttcgttgatccgaaaaatgtagatggacgaaacaataaaccacccgctatgcgggtgcgcgtcgattgttatacaaaaaaattacctttccgtgtacaataaagttgttcaggctatattgtagaaaggaaaggtaatttatggcgaagaaagaatattcactcgcacatacaaaatggatgtgcaaatatcatatcatcttcataccaaagtatagacgaaaagtaatttacaatcaatacaaagaggatattagagatattataaagcaattgtgcagttataaaggtgttgaaattattgaaggacatctaatgccagatcatatccatatgttagtaagtattccaccaaagataagcgtatcatcatttatgggatatttaaaaggaaaaagtgcacttatgatattcggtaaacacgcaaacttaaaatataaatttggaaatcgtcatttctgggcggaaggatattatgttagcacagtaggattaaatgaagcaacaataaaaaagtatatccaagaacaggaaaagcatgatattgcaatggataagttaagtgtaaaagaatatgaagacccttttaagggttaatgctaagtagtaacaatgccccttaaggggtagcgcgagtcaagagcaatatggcttgaacggagctgtgggaagaatgtgaaaacagaattcccatagcctaaagagaaagctagcgccttgagacgctagcctagtaacaagggcttatagccctagagcaaaccacccgttggacgggtggtcctgattcgttcagaaaaaattttttcaagaaatttttgcaaaaggggcgattttgggtgtgcatttcatacacctttgtccaaatgagtgaaggggttcattccggatagcaaaaacggaagccttttcgcttgaaaattgaataagtcattcactaagactttatttctgatgatagctactttagcaggtatgccgtgatttctgtatttcagaatagcgagaactccggctatgagtatcaggttgcccctgatatggcgatgacaatcagaatgataatgatacttctctacggagctggcggagtacccggcagaggttataatcctatgatacagataagcagtctgttccttagtgatttcccatcgaagataaatattactactcgctggatctgaattactatctgaataacctggaggatgatgtctatgaagcttaatcagtttgcagtttatcgtgtggatcagaatacagagggaaaagtgttgtggcacttgccgtatcaggaagcatccagacaaaacgtgccgatttgtgtggaatattacaggcagatgtcgattcagtctatgcaggaaactgaaaaagtcatggatatctggatgaagtcgttccccagtatcttgccggatttatccggttgaatacttccggtgctcttgtcacgatcgatacgaagaattatcagattgatgggaagaaaggaaattgggcggctgcagatacggtgatcattgacgggaagcagttctatctgatggaacaccaggagtatggcaatcaggcgagaggtgttatcttagatgcttatggaaaaacaatcgttgatgaatgtaaacagggattcgatgaagaaaccaggcagaaaatccatgaatatatacaacagcatgttccacaaaatcctgttcatcagcttagacgacagaataccttgcgtctgggacattatcagaaattctatgagaatggaacctttgaaagaagccgtgagtccggaacagaagccaattataatatggtagatggcctggtaaataatgagaaaaaacaggcgaatgcaaaagaaactgtaagaacagatcataatgtaaaacttaagaagcgaagatctgtaatcaagagactgcgtgaaaaacagattgccattgcagtaaaatccggaaagccgattccgaaatatctggatcaggagatagaacggaggcggagataatgccataagtgtataggttcaggggagaaaggtctctgctgagcctttttgcatttctcaaaattcgagaattagagattcgaaagtcaacaagtctgatgtatatttaagaaaatcattccgttataatgaaaacaaccattaagagatagaagctagaaagaaacggggtggcatgatgaatacggaacagagaataaaaatgatccgattgatagaaaaaatagataaaaatccggaattcagccagaaaataggtattagaaatacatcggctttcgtttcggataaatcaaagaaaataactacagatagccatgtataagaagatggcagaaggagaagaagaatgttaacgttattatttacaatttgtatgatctggtttataggcaagttttttatatttggactgaaagcatcctggggaatcttgaagttgctttgtaccgtggtatttttcccggtgatattaatcggaatggtggtaggcggtttggtttatatcgcatttccgctactgctcattggtgggattattggacttatcgtatcgaaatcataaatcagatgaaggagatcagagcatatgtatgacatagaaaaagaaaaaagagaagcaatcaatgccggaaacagggctttgaacagtctgcgaacagccagagaaaacctgaacagtgcaaagaactggggactggcagatatgtttggcggtggattttttactacgatgctgaaacattccaagatggatcaggcaaagcagaatatggagcaggcgaaatatgactttcgcaacttcagtaaagaattggatgatgtcaacatggcatgtaatctgaacattgataccggcgatttcctttcgtttgccgactatttctttgatggatttgtagtggactggatggtacaggatcggatcaatacggcaagacgccaggtggatgaagcaatccggagaacagaatacatcgtgaatcagttacagcgtatgtaaaaagacaggcagtgaatcaatggataagttggttcgctgcctttgctttacttcaatttttctttttctgcattgagcagatcaatgttgagaccctgttcgttggcggttttatctacccagagatttaaggaatcgacagccagagagatttcatccagctttttgctgatgaaggcgaaatctttcatctcatcatcactgatcttgccgtcccgggcaatctggatcaggcgtgtggtgagagggttgatctcattcagactggcgattgtctcaagaatgatatctgacagatcggacacttctacttccggaacatatcggtgaccgatctcgcatttatgagagcagaaataattgcaaagatctggacgcttataggcatcagccatctgaatgatatcgtaaggtgtaggatcctgcatttcatattcaaatttttcaattttagagtcggagactgcagtcattttttcactggcttcggatcttgtaagccctgcctcttctctgcaaatctggtaaattgtcttattttccctggtggattgctttcccatgagaataacctccctgtatgtcacaaaacatgaggaataccgatgtgtaagtccgcatgttgtacgtgtatttgttgtatatagtttattatacttgaatcatgaaaaacaaacaacaatcaatagaaagagaggaaaagaaaatgagaaaaacaagaagcgattgtagggtgggtacatttgaaaagaaacatggtcttccgccaggaactattcgaaataaagacggaagagacacgaggagtgataaaaaaataggaaccatccgtaaggaagctaagtaggagaatacagtatggaaaagaaaatcagaaaaaaatactattcagaagaagcggtgaagaaagcattgcaaattgattcttttcgaaacctgagtaaagaaaaagtgatggaatttacttctatgattccatatatggaaaaggaagtagcaatggaagtcataaaacaattccctatatatgtggattttgcaaaaacagtaattgagcattatacgcaaatatgtgaaacaattttggcgacaaataaagaggaatatgaaaaggctgtggatgctcatcaatttgtgctagagtctttttcaaaacaactagagaacgaaaatttaacagcggaagaaagggcaaatctttcagataaaatgattgcagaagctgaaaaaattacagaattgtatttgcaacagcagaaatttcacgagcggataataaaaacaatcggtggagtggtaacggttactttaggcgtgactcttacattgcttggattaaaagtaatcggaagtgatgatgatttaccacagatcggtaatgatgagaatatagcataacatttttcaggataatacaaattgcagtgacaaagagagtaacattattggctcaggtgagagaggcatctgagccttcttttacatttgaaatagattccacatgcattttttgaagaactcatatagttaggtggtgtttttataccctatctattgacttacactgtaatcatcaaagaagaaaattaaattctaaaagaaatggaggaactggcaatgaagaaaggatttccgacaggtgatggttacataggatttgtagaaggcagatatatcttgtttgccagcgaatccgattactatgagtacaccatcatattatccatctgacccatatgatgtatcagattatgatgatccagacgatttcgcagaagagtgggctgaggaattcggcgatggtaattacgatgatgcgtatgattattgggagagtgaatgggattgaaagaaaagattggacacagtagtccaggtacgttcagttcaattatagtgcgtagctcctttttgcttatgaaaaaagtttgtgcaactatctgcataaacttaaaataactcaaaaacttgacttttaacattaatcaagttaaaatgaaaaaaattaagttaaaaggagaattggaaatatgcttacaagcgtattcgggatttctataaaatatgaagcatggaatcatcaggattctttgcctgtttatattgcagggagttatgattttcacacagcatatattggaaacagacgctgtataatgcttgctccgacagaagaacttgccacacttccggcattgaaaaaacagattacaaaaatacagcagattgataatgtaccagtcgcatttgaacttgcgtcggtatctaattatcgaagaaaaagccttatagaaaataatataccgtttattactgataagcaggtctttcttcctttcatcgggacaatgctttctgatgagaaagaaccccaaaagctgacaggtaagtttgtttactccacgcagcagttgtttttattttatctgtacagtaagaaaaagcgattgtatatttcagaagccggaaaagtgcttccatttacagcaatgaccttgaccagagcagtaaagcagttggaagcgacggatttatttcttgtagcaaaagacggtgtcaataagtttattgagtcaaaatataagcgagatgaattatttgaaaaagcaaaagtatatttgacgactcctgttcgaaaaacaggatatatagataagacgcaagttacagaaaatatggtctttgcaggggaaacggcactttctgaaaaaacaatgctaaatccaagtcgagttgttacctatgcaattagtgagaaagattatgataaaaccttgttgactgatgaattgatggacccgaataagcaggtaagacttgaattatgggcatacagcccgaaacaattttcagaggataacagtgctgatgatatttccattgttttgtcttttgcagatacaagcgatgagagaattgaagaggcagtagatgaattacaggaaagaaggttgaaggagtaatggtcagcggatttacaaaatttaaggaaagatttcagggttttgaaaatcaatatgtcatcatcggtgggacagcttgtgatttgattatggaaaatgaagaattaccatttcgtgctacaaaagatgtagatattgtattgattgtcgaatccataacagcggagttcggcaggcagttttgggagtatgtcaaggaagcaggatatgagcatttgaataaaagtaccggaaatgcacagttttatcgtttcacatctccgaaaagcaaagaatatccatatatgatagaaatattttccagaaatccagattttattatattggaagatgatgcagttctcacaccgcttccgatagacgatgaaatctccagcttgtcggcaatccttctaaatgaagcgtattatgaattgctaaaaactggacaaatgatggttgaaggcattccggtattaagtccgacttgcctgataccatttaaggcgaaagcgtggctggatttaaaagaacgcaagttgaatggagagcaggttgacagcaaaaatataaagaaacataaaaacgatgtgttccgattagcacagttaatcacagtcaatacaaggcaagttctcaattcggaaatagcagaggatatgaaaaagttcttatctgaaatagctgatgaaacagtggatttaaaatcattaggcattagagggacgcataaacaaaaaattatagatatgttgtacctgtgctacaatttgaacgataatacataatttttctctaaagccaaaaaaatttcatattagaggctgtattttcaccctccttcttttgtatatatgaaagatatttttttatgtacgaaggaaggaggttttttcatgcctaaagtcagaaaagaaattccagaattggaaaagctggtgcaggtcggaagaaagaaatttgtccgttatgaggaaggggcacaattatattctatggggttgcatacatttcaggaattagcgaaagatgcaaaagcagtctatcatgtgaagagagttgttctggttaatacagagattgtggatgaatattttgagaatttcagagatgaattataaaaaataaaatgtaatacatgaggagcaaaacacgttgacttgttgtcggacataaagtgtaatagtgttgtaaggaagtccagctaataaatgtcaatagttaaatgaaaaaattgctcttattttctggctaaaaaagggtagacgtcccccttggtgaaaatatcgttcttttgaaagatattgattcgttggatgtacagtattttatgcagccatgtcgcatttggaagcattgtattgtttgatatgctcctgtggagtgatgatttcaaaagacttgttgtctctgagtattgcaaatatcatattgcataccttatgtgaaacagctcccattgctacgagctttggttttgagtcacatttcttgagggagtactcacgaagaactggatttttagcttctccattacgggagatactaatgctttgtaaggttaacgtgtgaataacacgtctggctatggcagaaccacgcttagacatttgaactttggtaccttcaaattttccggattgttttactgccggatcaagaccgaaataaacgaaaagttgttttggttttgaaaatgctgaaaagtcaccaatctcacccatgatggatacagcagacaagaaaccagcacctttgaatgtttcaatcaaatgaatctgcttgacaaagtcggcatcttcattagcatcaacaagctcatggagcgattcaagaatgttgttgatttcttcatcatatttacgtatgaagctgatataaaggcgaatacgcttgatgttgctgtctatgatgtaaccaaactgatttgcatcagttgccgcctgaattatggcattatacttattttgagcatatgtaagcccaaagcgagctgttgatttgatgatatcaataatctcttgcttgtctgcttcaagaaaagcagagggagatgtataagtctccaacagtataagagaagtgttgattgtaaccttggaaaagatgctgagatactgtggaaacgccatgcgtaattcaccctgaagcttattcacataggcactgcgattatccattaaatcgtagtattcacggcataggttacggcagtttagagcaaggtctgaaggcaattgttgcaaatctccagggaaagattataatataattagtgatgtattatgtttttgaggacatgtgcgcactataaaagtagggggagatatatcttcctcatctattaaataaaaacttatactacacaaaagacacagccgacttgtggctctatggacctcagtggaagaccaaaaaaatcggtttttggatgtgtacggtgcttgacggagctcggtggacaagggtggaaggaatcgttcaattaatcccgacaatgaagtctatcggcgcagataagcaggaaaataaggcatctaagagtaacgaagcagaaaaatgcgaccagattgcgactaaagaagagaagattgatttttcaaatgtaaagattgagcctttgtttgaggaagaggtagattttgatacattcagcaagtcagacttccgtgcagtaaaggtgaaagagtgtgttgcagtaccgaagtcaaagaaactgttacagttcactcttgatgacggaacaggtattgatagaacaatcctttctggtattcatgcatattacgaaccagaagaattagttggaaagacacttattgcgatcactaacctgccaccgagaaaaatgatgggaattgaatcttgtggtatgttgctttcagccgtgaataatctgaaagattcagaggatgaagaactgcatcttattatggttgataatcacattccggcaggcgcaaagttatactagaattaaaagatatcaaaattcagaaaaataaaatcattgatttaaagagaacacgtttagttaaaagtagcagacaattaatgcctgctacttttttataatagttaatttgatttgtaaaaacataatatttcgtcaacttgacaatcaagaatattgcaaagcatatcaatggtgtgtgtcgatatatgcgtattcgaacgcatacgagacaattgaccggctgagacatgatattggtttatgagctgatattgtgttatatgctttttcttgagtgtattaaaaaacggctcattgcaagttatgggatgcaggagaaaagggacttacattatctgcttttgaatgggagaaggatagaaaaacgctgatatatgggcaggtagactatatgtatggagaagcactttataagcctgaaatgaaagaaggaaatcctataaggttatatagtttggatggaatcacggagatattcggtaaattaggactttgtatttgtaacagcttatttagcaatcttcatcaaatctttatttttttctgttaggttatatttcagtaagaaatgaaatatggaaggaaggatagtaaagatggaaatgatgttgcagacacaaaatttgtgtaaatattttagaaaacagaaagcggtaaataatgtttcacttaatatcgaaaagggacagatttatggactgcttggaccgaatggcgctggtaaatctaccacattgaaaatgttgactggtatgatgaaaccaactgcaggcaagatttactttgatggaaaactttgggataggaaagatttatcaaaaataggggcgttaattgaaaatccgccaatttatgaaaatctttccgccagagaaaatttgaaggtaagacaattattgcttggtacagatgaaaacagaattgatgaggtcttacagattgtatcacttacaaataccggaaagaagaaagcagggcagttttctttgggaatgaagcaaagactaggcattgcaatggcattgcttggagaaccggaacttttgatattggatgaacctacgaatggattagatccaataggcatcgaggaattacgagagctgatccggttttttccggaacagggaatcactgtaattctctccagtcatattctctcagaggtacagttacttgcagataaagtcgggattatttcaggtggaatcttaggatacgaaggagcattaaagcagggagataatcttgaagatttgtttatgaatgtggtaagaaaaaaccagaaagcaggtgaaatccatggttaatattataaaagcagaacatcaaaaagccaaaagaaccatgcgaaaaaagtttatctggggatttcctcttcttacatttgttatggcatttatatttactcttgggatgacaaatgcttatgcagaaagtgtttggaactggtggtatacacttttgctgccggggatgattgctccattttgttatctttctgtggcgcaggagaaaaagataaaatactatcatttaatgactattcccacagacagaagaaaattggtgctggggaaaattatttatattgggtacatgattttgttttctaatgtgattgtgtttgcaggagcaacgcttggaggctttcttctaacgacacatgttccagttggaggagcgttgattgcagtattgtttctgacggtttctgagttatgggagattccggtagctttatttttaagtgaacgatttggaatgattgtaaacctgttcgtctgcctgtttattaccgtcagcggtgtggtaatatcacaaaccagaatctggtatgtacttgtttctgcagtccctatgcgaatgatgtgcccgttgcttcatgttttaccaaatggacttgccgcagaagcagggaatcctcttttggatacgggagtcattgttccgggaatgtgtctctcaatcatctggtttgtttttgtaacggttctgtttttgaaatggtttgagagaagagaggtgaaataagatgattggaagatctcttaatgcagacttgcgaaagatgaaaggaacatctgtgattctggcacacttactgattccgattataaccagcgttatatttttaatatattactttttttcaccatggaatgaaaatatgaaagtgattgcattttatcaggcaataggagcaggacttccggtacttattggaatttttacagcaagtgtgatggaacaggaacaaaatgcaggtgattttcaaaatctgttgtctttatcggataaacctgcagcatttttatcgaaactgttgatgctactggttttgtgtctgtgctctatcctattgacagcaatcatattcggaattggatttggaagaatcgcatcaagcgatatcgaaatcatgaaaggatgtatatttgcagcattgctgctgtggggaagcagtgttccactttatctatggcagctgattctagcttttcagtttggaaaaggggtatccattggagcagggattatatcaggactaattagtgcattgatgcttaccggacttggagattatgtgtggaaatatgtatttgtctgctggacgggtagagtaccatatacttatctgcaatctgtattgggagaaactagtgtaggtgaatggttgtcattcataccagattgcttaatatttacagggattagtatggtatactatttttggtgggtaaaccactgggaaggaaacagaatatcggaatagaatcgagggaaactatggcaaaaatactggcagttgatgatgaaccggcaattttggaaatgatagaaaacattttgaataaggatggacatctggttaccaaagtaagtaatccactaaaaattaatatggaagaattacatcgttatgacctgattttactggacattatgatgcctggaatggatggcttcgaattatgcaaaagaatcagggcacttgtggattgtccgattttgtttcttacggcaaaaacggaggaaaacagtctggtaaacggactttctttaggagcagatgattatatttcaaagccatttggagtgatggaacttcgggcaaggatcgatgcacatcttagaagagagcacagggaacattctgtccggatggttttagggagagtctgcattcagatgtctcaaaagaaactattggttgatgataaggaacttcctcttacgaaagcggagtacgaaatttgtgaattcctggctaaaaacaggggacaggttttctcgaaagaacagattttagaagaggtctttggttttgacagtgagagtaatgacagtaccattatcacgcatatcaaaaatataagagcaaaatttgcggattatgattatacaccgataaaaacagtctgggggattggatataaatgggaagagtaaagagaagcaatgcactcagcaggatttttatgagatatgtactggtcatgcttggatcattagttggtttggtgattgttgcttatctgctgctgtaccttttgattagtgtgggctgtatttatccggcaaattatgcagagcaaaagattaatgaagcatatgatacgattttacgtgcagataaagtgactgctgagatgattcccgcactttgtgattatgtaatcttttcagagaatggagagaaaataggtggagatctgtcagaacaatacgaacagatagcatggaatgttgcaaagtacggaaacgcatccgggaaatatttttataaagtaattgtaagggaaaatgaatatgttgtattgcaatatcgcctgacacctcaatatcattcagcttttttgagggagcattttataggaccacagaatgtgatgattattatgtctgtgattggatcggtagcgattatcatcattccgtccatacgttttggaaaaagaatcaaaaagcagatgcagcctgtattagacgcaatcggacaaataaaggatcaaaatctggaatatgagacatcctgttccggtatcaaagagtttgatgactgtttatcggcaatcgatgatatgcgagatgcattgcgagaatctttagaaaagcagtggaaaacagagcaggaaaagaaacaacagatgtctgctttggcgcatgatattaaaacacctcttacgattgtacggggaaatgcagaactactttcagagactgaactgaccacagaacagaagaataatatcacttatgttttgaatggcacaacacagatacaaagttatgtaaaacagttgatagatgtcacaaaatcatggaattgcagtgatgttacctatacaacggtgaggttagaagattttttcgcagatataaaggaacaggcactcggactggtagaaatctatcaccagaagatagattggaaggcggaacaaagtgataaaaaggtaacgattgcttatgatccaatgttccgagccgtaatgaatgtgattcagaatgcagtggagcatacaaaagaaaatggaatcatttatattgacgcaaaggagcaggatgaccggctgacattcattgtggaggatagcggatcaggatttacaaaagaagcattattgcatggcacagagcagttttttatggatgacacaagtagaaatggcgaagcccattatgggatgggactattttttgcaaaaactgtggctgaaaaatatggtggaggtattaaactttcaaattctgaaaatacaggtggggcgagggtagaaatatttttcctgagtagtcaagaaacaagctaaatagaccgcaaggaatgttgtaggatactgtgtattcactctttggacaattggaacaatgcttccgatgtggattatgagagatactttctttgcaaactatagagaaaacggtggaacagatgcatacatagacgctgttatggcacttactccagattacatggtattggtaattatcgtacttgctattgtaggtggttttttgggaactatgcttggaaagattgtattaaagaaacattttgaaaaagcaggaattgcctaaaaagagtaatgccacatgtttgaaaaaatgtgtggcatttttgtataagcgcttaggaacttgatgcgtttgctgttaaagtggcaggtgatattattcatttcgtagaaaatatagaaggaaaggaaagttaaaacatggagaagcaggcattatatattgacccaagaacaaaattgtttttattgctcgtgatgaatattgtcatgctggatacaagttcaggtgttcttttaccatatctgagattcatcattggctttttgccctttgtcttgcttttaacatcaaaaagatttaagcctgcatgggtctacctggtgatatacctaatcagtcacatcattgtcttgtatgtattagattataccagtggatttatgatgatgctgttgggatttctatcatcgatgggtacaaaatttttgcctggtggaatgcttggagtgtatttttctgtagcacaagggtaaacgaatttattgcatctatggaaagaatgcatgtatcgcaaaaggtcattattcctgtttctgttatgtttcgcttttttacgacagtaaaggaggaggcagaagggatcagcgatgctatgagaatgagaaaattaggattttcatatttcttttttaaaccggtggagatactggaatataggttggttccattaatgatatcagtggtaaataatgtttgctttcattaccaagagcaaaaaaatgcttcattaactcatgttaatttacagattaatgagggagaggttgtggttttgtgtggcgagtcaggctgtggcaagtctacgattattcgtctcattaatggactgattccttattactacaagggacgtatggatggtcaggtaaaggttttgggacacttaacgcaggaaggtaacatttataatatgggaagtaaagtaagtagcgttttccaaaatccaagaagccagtttttctgtgtggatgtcaaaagtgaattggcattcggtgctgaaaatctaaattatgataaagatgagattataaagcgaattgaggacgcaagtcatgaattaaagtttgaatatttacttgacagaactatgttccagctttcgggtggtgaaaaacagaaaattgcttgtgccagtgtgtctataacagataatccgatagttgttttggatgaaccttcatcaaatctcgatatgcatgctgtaactgaactgaaagcgatgattcgatactggaaacagaaaggcaagacagttgtaattgctgaacataggttccgataccttaaggggattgctgaccgttttatctatatgaaaaagggaaagatagttcgtgaattcagcagtgtagaaatgcaaaaactgcctgccgaggaacttatgagcatgggacttaggaacctctcatacgataatctggaaattcaaaattacaatgaggctaaaacgtttatgagaatacatgactttatttttcgatataaaggctcaaagaaattgagtttattcattgatgagatggacatcccaaaggcttctgttatagcaattattggcagaaacggtgcaggaaagtccacatttgtcagatccctttgcggtttagagaagaaagcaaagggattgctggaagatggcaatgtcatgctcaaagcaaaaaagaggcttaataattcttttcttgtcatgcaagacgtgaatcgtcagctttttacggaaagtgttgaagaggagataattcttagcatggatgagaaaaatgataatttgttagagggaatactaaaagaatttgatttgtatgattacagaaagcagcatcctatgtcactttccggagggcaaaagcagcgagtggcagtagccagtgcagtagcaagcatgagagaatatatcgtttttgacgaaccgaccagtggattggattatttccatatgatgcaggtggcagagtgcataaaaaaaatgcacgaaaagggcaggaccatttttttgataactcatgatttggaacttatttattcatgttgtaattatattattcatatagaaaatgggatgatcaaggaattgtatcaggtgagtaaggaaaacgagccgaagttgagaaacttttttgaggtttaataaggattttttgacatagtgagaaatactcttgactactatttatggatgaaataagacgtttcttcctaaaaacagtatgtttatggtatactagctaatagtagtgcagtttcaaccgatattacatattatgatgagaaattaatgcaaaggagttacaatcaaatggataacaatgaagtagtaacagaagaagtggcagcagttgttgaaaatagtacaggtattgaaatagagtctttatttgaggagcaggttgattatgatacattctcaaagtcagacttccgtgttgtaaaggtaaaaaattgtgaggcagtacctaagagtaagaaacttcttagatttacacttgatgatggtacagagaatgaaagaactattctttcaggagtacatgcattttacgagccggaggaacttgtaggtaaaactttacttgcaatcgtaaatcttccaccacgttctatgatgggaatagattcatgtggtatgcttctttctgcaattcacaatgtaaatggagaagaaaaactgaatctggtaatgttagatgacgcaatcccagcaggtgcaaaattgtattaagaatataaatgtcacatggttgttaataactgtgtgacattttatcgttgttgttgataatcggaatttgtacagttaacttctggttttattgacgcttgaatattctctgcttgaatgctcttattttaataccataacgacctgaaaaaacaaatcctgttagtaacattcctaagctcacacccagggcaacatcaataattatacttactacctcgttttggacatacagcgttgtatccttaaacaacatatatactactaagaataacaacgcaatcgaattgcatatacgaaccctgtggttatacttctctgactccgtagttgtataatctactgcctgtaatacagtttcttttatttcattcttcattttctcacttttcctctctccatttaatatttcccggagatcaacagcatataaatcagaaagctcaatcaatatatcaatgtcgggcatattgtttcccgtttcccaacgagatattgttcttctggcaacattcaatttctcagccaactgttcttgagtcatcccattttctttacgtaattctgccagaaacttaccgattttcgcttgattcattgtgcgcaacctcctttacggtgttcagcatataacttttcactgttacctaacaggacacaaagtgagcaaatgccctgttttatctatgggacactcttgtcccactatttttctgccgtttatactgatatattattctgaattataaacaattcgacaaattccatttgtctctatctttatttcttaattatacacaagatttgaagctttttctacttatctattgttctaaaatatcttcctaaaaaaataatttaaaaaatttttaaaaaatagggtgtcaaaagcctgagcaattccaaataagtgaagggagtaattccaatcaataaaaatggaatcctttcacttgaattgaaaactgaatatacaggtcactaagacgttaattctgatgatagccgctttatcgggtgagtggtgtgttttcgacaagattacaatgacaaccggaaatattgaaatcaaatgcccgaaatgtgggtatatcaatgagattgacctttctttaagaaaaggaagtgtcaagtttaggaaatttaaaatcaatatagattgagcagacaactgaataattgtgttttataaaaagtaaaggaatctgcaaaaacagattccttaaaccaggggaaatccctgtcgaagaatggaacaccagttacttttttgatagagaaaacggactacaataacggtctgcttttcttcatcaatagtataaaaggcaaggtaattattgattattacaaaacgaatttcccaacttgctaaaaccggatcatcgacaagacggaacttttgaggaaaatctgataatgttcctatctgctttgtgacagcatctaacagattgtcagcaacttgtggattttttagtgtaaattcgatgtaatccacagcacgcataatatcatgctctgcggtggatgtgatatgaagctgataactcatcgtgtgcggcggctcctgatatctgccatagcttcagagaaaggtcgggtgttgcctgatgcaatatcgtccattccgtccttgatttggctgtaaagctcaaagcggctggcaagattttcgtaggcttcaatgctcataactgcaaggtctccttttccattcttcgtaatgaaaactggttctggataattatgacaaaatgtagaaatttcattgtaattattccttaaatcagcacttgatttgattgtcggcataaaagcacctccttatctaataacaaaattatacataaattttgttatgaagtcaatgggtttgctataagtgttggcagaattaaatcttaatatgtcaatgagattgacctttctttaaagaaagtaagtgtcaagtttaaaagcaattggcagcgatgaagatttacctcaactagatgatgagaatcaaaatgttgcataatagctttatctataattgaaaacaacaagatggaaaggctcagaaaaaggtattctgggccttttgtcttagaaggatagcagtataaaagagcagggatttttataccccacctattgatatacactgtcaccatcaaagaagattaaatcataaaattcaaagaaatggaggagctggcaatgaaaggaatattcggaaggatgtttgatctgaaccatgatggaaatattagtccactggaaagcgcaatggaatttactttcctaaatgaactactgaaagacgattctgacgtacagacagagttagaattatcgggactggatccagacgagttggagtttatggatgcagatgaacgaagagaagtactggaagatgccggactggatccagatgaatatgatttctaaggaaggagcatttataatggcaaaagtatttatcacacataatacatctgtccttataggaaaggtgaaggttctttttcagatttttcttttgattctttttcatggtggactcctttcataccacactcatatcactaagatcattatagcagaaagaacactccccctgagatttgtcaaggtaaattcccgtaaaggtcaaaacgggaagtttcaataaaattttagcaactttttttatgatgtctaaaggaattgacaaaaaatatcggggggtataatgacagagaatatgctgagattattgtgtctcaggtagaataaaaagaggaggaaccgcagccggaggaaatgcctcagacgccgatctggctgctggtggcactgcttgcggtaagtgcaggagtattgacgaccgtcagtatccgcggaagaaaaagaataacgcgaaacttttcagagagtgttgattagcagccggatatatgttatcttaaaaaaagaataccatagtgaatgaagcatattgacatcatatagtatgtttgtatgcttcgtttagtatatgaatgaaaaatggagagataaagtgagaaacagaagaattaaaaagattttaggagcgatgcttgcggctgcaattgtgtgtcagacgagtgcatcgccgggggtactgacagtacgtgcagagacagcggattcagtcacagcggattcttccacggcagattcttccgcagcagattccgcggtggatgagcaggaacagatccggcatggggatatggatgaaaacaccggagctgaggaagacgttgatgtgaatcagggggttgatgtcgaggcggcgattggcgggactgaggagaaggcggcagatgcagtggcagagtctgcgacagaagccgagtaccgttatatatcggatatggagtatattacggacaacagatggtcctatgccggctggggcaatatcatgaaggataaaaatatcgaaggaggcaccatcagccttctgctcgatggctccagagtatacttcaaaaaaggaatgggagcacacgccacatcacagcttacctatgatatttcagcgtattcggatgtctatacacgttttgttgcgaaaatgggtgttgatgcggaacgaggcggcaacggagaggtctggttcagaatctctgtctcaaaggacgggacaaactgggaggaattatataagagtggggtggttacttccgccagtaatgcgatcgaggtggatctgaatgttaagggttaccggtatctgaggctgtattcagacagcaacggatcgaacggggcagatcactctgtatatgcggacgcaagaatcgttaagacagattatgatatgtcctcagaattaatacaggatatcagaccgaccgcatattatgatgaacagctttcccaaaatacagtgaaagagaattacagcaatcagctatataccgtattaaaaagagaatttgtgaaccgcatgggatactggacattgcagagtgcaataaaagacgatgcagatggagaggttctggaagcgattcggtggatttttaataacaaggagaatctgcagctgtttatagagacgggaaatgtaggggactcgcaggcgtgtcttaagctgcttggaagtctgtacaagaaccagaaggaggatctggacaaggctgacggggatatatataaaaagatgatgatcgcactggcgatatcctacagcactgaccgtaatggctcaccattgagtttcaattcaccggcgaactcctatgacattaatgaacgctatgagattttaaaagagttatatgatacggagctttttgtgagaaaagccgagttttcttcctatcatatggaactgatccgtatggtggtgaatgactctactgctaacagtgagattaagtggctgcgtggatattcggaatcaaaatatccgaataatctcgaaaagagattgaatccatataactatatgaagtatatctcgccgaattatcatcaggacaggctgtatgcccaggagaattatgcggcatataatgataaatataagctggagcagtatggaatcccatatggtcttaattcggatggaagtaagacggaaaagacctggatggtaatggaggccggaggtatctgctggaatatctcaagacttggttcaaatctacacagagttcatggaatcccatcggtaggtgtctaccagccggcacacgagtcttatctgacctattcggtgaatgcagacggcaagggtgtgtgggatatcggcaacaacattttcggatggggacagagctcgaccacctggtatggcggaaacggcaaccgtttgctgtttgactggaataataagtcctttacaagaaagcatatgggaattgatatggatcttggcaatggcaacaaatcttctgtaggaaataacggaggatatcagctgttgggacaggcggcactgaatgattatgatcattataataaatcattctattataatctgattgccaattcttatggagaaagtaaccgaaaagaggatacataccgtaaagcattggaagcattcaagctgaatcttgacagctatgagcagctgatcggcatatataaggaacagcagcggaccagtgcagaatggagagcacttgcagagcagattgtagatacatacacatactatccgatggcaatgacagacttgttaagagtgattgagccatatctgggtaacgatgatgtcatagagattgatatgctgaaaacagaggctctgaataaggctgtaaaagcaacggataaggaagtcctacagtccggtgcatgccgcgagattgcaagtgagctgctgggaagcagtaaagtggaccttgcttctttctcgtttgatggagaaaatgccggcaagattgttatgaattccaagtatgatgattacaatttccaggttcagtacagtctggacggcggaaacacatgggaaacgacgctggatcatcagatcagtcttacagaaaaggagatcagcagtatctctgcagagcatgatatacaagtaaagatatccggttccagtcaggtgtttatcatagacattctggagggagaaggaatcgagtctaaaacattagctgcaaatgatgacgagaatacatttattggaaaggttcagaatctggaatgcagtacagatggcggaaagacctggacagattatacggcggacctcagatttgaaggaaaggtaaaggtgacagctcgttataaagcacatggaacttacctgcagggagaatcgacagtatttgattttacagaagcagcagagacagaaacgaaacggtatatctatgtagagaatatcagctttgtgtcggcaggaaccgcacagagaggatatgagtctgaacatatgatagacgccagcccatatacgacatggcatacgaaatggggagaagtggcacaggataagacctatgttgtcagcctggataaagtacggtatctgtcacaggtgacgtatgatccggcaggactgaacggaagaattaaaaaagcgaagatctacgtgagtatggatggcaaggactggacactggccggagagcaggcgaaccttgcaaacaatgaacagagaaagacgattgcattaaaagagtcgatgcctgcaagatatgttaaggtagaagctgtagaaacctatggcaatcacgaaggtaataacaagtacgtcagcggtacaagatttaattattatgaagacagtacgaaggtctttaaggaaccggaggtagaatattccgtaacatcttggaccaatcaggatgttactgcgaccttgaaggttccggcgggatatacggtgatcggagacgagagccatacatttacagagaatggcaattatacatttacatataaagacattcatgacaaagaaaaaaccataacagccgaagtgacctggattgacagggaagcaccgacggcgacagtggaatacgatattacagaaacgacacagtttgcggtaaaagcagccttgaaggatttctcagaggagaatgtaacgattctgaatgcagatgaagatggcagtcacactttccaggaaaacggaaccttcacctttgaacttcgcgataaagcgggcaatatgggttatgtgacagctgaagtaacctggattgagaacggagattcgggaaaactggaaattgattcagaggtgtaccatgtgggagataatggtatcattaaaaatattaatgccaatacctcgctggaggagtttttgaaaaatatcaataccaatgccggaagcataaaacttaccagagatggaaaagagacgaaggttgttgcaaccggaagcgtattgacactgaatgataatgtaaattatactctggtggtaaaaggagatctgaccggcgacggagctacaacagacgcagatctggctatgctgaacaaacatctgatagaccgcctggtgatcaaagacaggataactctgctggcggcagatatgaatcaggacgatacgattgacattgtggatttgtctgttctgaacaagacgatcctgaaaaaataagagtgcataaaggtcaggtaaggaaaaatatgaaaaaaagagtatatgtgatggctgttatgattgctgtattgatgtcgttcagtaaccttacagtgaatgcgcaggagaaagtgaaactgaatgcagccagtaaagagaagacgttagaggtgacacttgagttgccggtcacagagaagggaatcgatgcaatggcgggaaccctggattatgatcatgcaaagttggaactgacagaaatgaaagcaggagattccagattgcaggaaccggtgtataacagtgataatggtaaatttacaacggtgattaagtcagaaacaataaaagaatctgttaatgcagtacagtttgtatttaaaaagaaagctgatgcagcaggggagacgattgtaagagtgagcgaacttacagcggctacggcagaagatacaaagcagatgctggatgctgccagtgtgacgataacgttgggagatacaacgaaaccatcagaagataagaatgattcaaagaatgattcgccaacaacagataagagtgattctccggcaaccggggaaaataattcatcaaatagtggaacaacagacgaagaaaggaataggaaaacagatacagcagagaggaaaaatggtgtgaaaaccggagatgttgctgatatgtcggtgtggatagccgggatagcagtgagtgccggagtgctgatagctctgaggatacgaaaacgaaaaataaaataatacacagaaaaccgggaggctgttctgcaggatgcagacagcctcctgctttgcgcaatcctgattaaaaatgcggtaagaatcctgcaatgcaggattcctaagatgagaagcaggtgatatcaaaattagacatgacaaaaagacttcccagatggactgcgaagaaaatgctataaataccaaaaggtcaggcaatcaaagattttaaacttcgtatatattgatgctggtggattttatcagcaacaagtacgggaacaagctgtgtaattccggcaagaagtaaatcagcatgaagtgttttttcgttctgtgtttggcgtttcgcaaacgcctatgaaaaaattaaattaaaaggagaagattatgaagagaaagattattttgacagttattgcggcaatgatgattactatgacaggatgtgggaaaaaaccatcagaatcacaagctgaacctacaacgaaatctacgcagtaaacaggtgtgacagaagaaaaagaaccaggtgatgttgcagaatctaaagcacaaacaaagactacaagtggagatactacaggtgtatatccgaatgcaacaggtattacagaaatagcaatgggagttacagaggatatttgtacttttaaagtaccattaaattatgtactcttaggttcgtattatgatgaaaacaatgaagagcaaagcattcagggattggattcaactatgactaccatggaggaagcaatgtcagaaggaggattttctacaggaaaacatttggcatgtttctcaatggcatcacttgaagcagatggtacgggaattaacgtagatacctatgtgcctgatgagataacttgggatgagtttaaatcatattatccagaggcaaaatcaataggaaatgcatctgttccggcacttttatatcatgtagaggcatttaatggtcaggctgttgctgtagctcttaaattatcagataatattacgatgcaaatagtatatgaaggttctctggaaagcaaaattggagaggacgagttaggacagagattgtataatttggtgactgtaaaataatatacgaaaaacaagtatgttttagagaaaagaggacgtaattccgtttatgaaggtaaaatcacaatgaaggaagcacagagccttattgacagctattctagaaaacatgatgacgtttggaaaagcgggcatcatcaaggttctgcttgcattagatattttgatagtattagctgccctgctgttggagaggaagcaatatagcaaaaaaaacatttcgcttgtatctgatatatgcttgtatcctgacagctacagcgttccttgattatgttattgatacctggtatctgcagaatctggcgattttcttttcatccatgattatttctgtaaatcatatgatacaggtttcggatcagtggctggatgcaaaaagagaattgttgatttccgaatacagagcgagccacgatatcatgacggggttatggaataaaaccagtggtgtggatcaggttataaactgtttagaaaatatgtcagaaagtgatatggcagtattgggatttatggatatcgataatttcaagtctgtcaatgacacatatggacatgaaaccggtgttttctggattcgcgaagtagccacagcacttcaggaaatgtgtggtccgtcagacattgcatgcagatatggcggtgatgagtatattcttttcctgcagaatatcggagatagggaagaattaacggcacgcattgaaggcttcagaaaaaagattcatgataaagcagaagaaaagggacaggatgtgcattgcagcatcggactttatcgtgtgaagggagcagggagaaaattagctgaatgcatcatgatatctgatggtttgctttatcaggcaaagaagaatggaaaagatacttacgtaatagagtaaataaaaggggaagaaagtgatgtatgataacgtagtagttgtgggaatttgcagcagaacgtttttctatgagaaagcgggtgtaaggatcctgagaatgatttcggatatgctcaaagcttccactgtctacaatacgtccgctgttcattacgaggatacggtctgccactttagaaattgcgcctaagtcatgggtgatgaaaatcagctgataaccagctaatacttcaaagagaaggtgtttttcttgtaagagaggacaccttctttttgtaatttgcttaattcattagatagagcacttcgatctgcattcagataatctgccagcccttgcctatcgtaagggattgtaaatgtgttagagccggcatgcatagattcgccagacaagtaattaagtatcttgtcacgtaaatttttcttagaaatatgatctattttgttcatcaatcttacattttttcttgctattatctctaacaggttatgaatcaatcttgtatggaaactgcaagatgaagaacaggttgtaataatatgatttatattgaaaagcatgacggtgagattttcattggcaatgacactgatttgagcaggaacactgctgatgcaggcatagctttcgccatagagcattcctgatgacagctctgtaataatattgcgattcccccagacatcatcatttattatgagagcctggccagatagaatcatgccgatagtttgtaccttatcgccacttcttagcaggtattcaccttttgaataatttttaatgctgacagatagacatttaagcattggaagaatttctgattctgaaattccttgaaacaaaggtgtattcgttaagatgttcatatatttttgcatgagttctataatccttcttttcatcttttccatagtatatcacaaaaatcgaaaacaaaacaaaaatgttgtctggacaacggaataattgttgtgagtttgatatagtaccattaaacaacaagaaatgatgaataaagcaatagaaaaggagaaagacatggaaaataaaatgttttgttatcaatgtgaacagaccgcaggatgtacaggatgtaccggaaatgcaggagtatgcggaaagtccgccaatactgcaagattacaggatgagcttacaggagcattaatcggacttgctcgtgcagccgagggcaatgagcaccttgtaaccgaagagatgaatcaattagttcttgagggattgtttacaaccgttacaaacgtaaactttaatgatgagacattaaaaattttaatttataagatagaaaatgcaaaaaagaaattagtaccaaattgctttacatgttccggctcatgtggaagaaacgataattttgatatgaatactctctggactactgatgaagatgttcgttccttaaaatccttaatactttttgggattcgtggaatggctgcatatgcatatcatgcaagtgtgcttggatataccgatgaaacaatcagcaaattcttctataaggcactttttgcagtcggaatgaaggattggggaatggatgaactacttcctattgtattagaggttggagaagtgaatttaagatgtatggagcttttagatcaggcaaatactacaacttatggaactcctgtaccaacaacagtacctcttacaattgaaaaaggaccatttattattattaccggtcatgatttaaaagatttacaacttttattagagcagacaaaagataagggaatcaatatttatacacatggtgaaatgctcccagcgcatgcatatccagaatttaagaagtactctcatttaaagggaaactttggtacagcatggcagaatcagcagaaagagtttgataatattcctggagcaattctttacacgacgaactgtcttatgcctgtaaaaccaagctacgcagacagagtatttacaacagaagttgtatcttatccggaaatggtacacataggagaagaaaaggattttacaccggtgattgaaaaggcactcgccttaggtggatataccaaagaccagcatatgactggaattaatggaggaatgcaggtgacaactggtttctcacatggaactgtattatctgtagcagatcaggtgattgaagcagtaaagaatggagatattaaacatttcttcctggttggtggatgtgatggagccagagtaggaagaaactactacacagagtttgtgaaacagtctcctgcagacagcattattttgacgcttgcatgtggaaaatataggttcaacgatttagatttaggaacaatcggaggacttccgagaatcatggatatgggacagtgtaatgatgcttatggtgcaatcaaggtcgcaatcgctttagcagaagcatttgaatgtgatgtaaatgaactcccgctatcgatggtactttcatggtacgagcagaaggccgtatctattttacttacacttctctatctcggaatcaagaacattcacctcggaccaacattaccagcatttatttcgtcaaatgtgctgaatttcctagtagagaattatgggatttctccaattagtacaccggaagaggatctaaaaaagttattaaataaataatcagacgggaacggaaagagacagatttacaattgtgagatagatttttcttaaaacaaaataggggaaaggcggtaaaatattatgagtaaaaaaattgatttaaactggtcggtgtatgatattacgaaaacttatccagaagtgattgatattatggcaaatcttgggtttgatgaaattaagaagccggctatgctaaactccgttggacgaattatgacaattcctaagggtgcaaaggcaaaaggaatttcgattccggttgttatagcagaactgataaaaaatggttttgaaattactggtaatatgccagatatttcttctatggggagcaaacaatttcaagccaaagagactggcaatacagtattactgaaggattatttaaagagacttggaaatggagaagatttagaaagtgttaaaaaagattttgtccagaatttttctgatgtagatgcttctgaaattatgaagggcagacaggaacttataaaagagggaacacctattacagaggtgcagaaactgtgtgatgtgcatagtgcattgtttcatggcttaaccaaagaagaaaaaatagcaaatgctgaaaaggcagtcgaagaatctttaaaaaaggaagaaacatccgaaatgacaactatgacggatgcatatgtcagaaaacatgagcttgcaaaagcactcagagaaacaaagggccatcctctttattcttttacagaagcaaatgagaagtttagcaaagaaatagcagatattagaggtgcactggaaaagggcgaagatgtaagcaaaaaaatatcagattttagacaaatagcaatacactatgcacaaaagggtgatttgatttatccactccttaaagttcgctatgaaatatcaggaccatcgtatgttatgtggactgttgatgatgaaatcagagatgaattagcagcaatagataaggaatgcaatcatgacgaagaatggattaaaagagtacaggctgttttaacaagagcagatgaaatgatttataaagagactaatatactgttccctatctgcgcaatgaattttacagccgaagaatggtatgaaatctatgaagatgccaaagactatgcattagtgtatggcattgataatagatgggaagaagcagaaaaatatgtgcaggataaaaagaatcgtcatgaggcggctatttatgaaggtgaaatagtaatgggcggtggacatatgagtgcatcacagttggaagctatgcttaatacgttgccaatagagattacatttatcgatgataataatataaatcgtttctttaatgaaggagcgaaagtgttcaaacgccctggcatggcaattgacagagaagtattctcttgtcatccgcctaagatagaatcaatggttcgctccattatagaaagttttaaaaatcatactcgtgatagcgttccggtttggatggaaaagcagggaaaaccatttttagttacttattatgcagtgagagacaaaaaagataattatcttggaactgtagaagtggtacaggatatgcagtttgcaaaagagcactttacaagttaaaacgcataaaaccatagattgtaatcgaataaaaagggaaatattctatgaggtgtcggataaaactgacacctcaatgagatgaataaaaagaataaagtagaaaaaagcggtagaaagaatagtatgttctggaagaggtgatcgagagggcgatactgatcctgatacttgtactggtggtcatacgattaaaggttactggtaattgcagaatttctgtgatacactgttatagaactttgtgaaagaaggaggaatcagtatggctactttaaaagatatagcatcaaaggctggggtttcacaaagtacggtttcaaggatattgaataatgatcagacgttaaatgtaacagatcagacaagacaaaaagttcttgaagttgcgcaggaattaaattaccgttctttgtcgcaaagatataaccggggaaattcccagtcggaagaagagaagaacatctgtatcggagttgcgcaaatgcttcagatggaggaacttcaggacgatatttattatcttcttatgaaaaatatgttagatagtgaatgttttgaaaaagggtggacaactgttccgttgtatcgagatgaaactggtcgtttcggaacgggacgtgagatagagcttgacggaatcgttgcaattggaagatttacgaaagaagaggtgaaagattttcaccagtatacagatcacattgtatttatagattcgtcaccggatgagatgaagtattacagtattttaccgaattatcatatggcggtaagaaatgcgctgaattattttgaagagatgggatatgaaaagattgcctacgttggtgcggtgaatacatatgattataagaaagaactgacaatggatgcaagatattattactaccggaactcagagacgatgcgagatacatttgatgaggaatgggtgatcgattcggagatgaatccacgcagtgcatatgcgtcgatgatcgcatatttagatgcacacaagaatcctccggaggcgatgctcattagcagtgacgtacttgtaccgggagtgattaaggctttgacggaaagtggattttctgttccgaaagatacgaatatgatcgtatttaataatacatcaatatcaggaaattgtaacccgccgttggatgcgattgagacttatatccaggaaacaatccgagcagcaatgctatgtatcgagcagctgcggatgggagaaatcattccaaagaaagtgattattccatgtagtttagtaaaacgtggaagtgtggaaaagaaaaaatagacaaaaaatgcgtgtccccaataggttgatacgcattttttttgtgcactttttcagcaagtaaaagggaaagtaaaaactttactaaaaacagtaaaaatagtaaaagttttattgactattagtaaaacttttggtaaaatcgttgataaagagagaaccgaggaggtaaggaagtttgttgttaggtgttgattattacccggaacagtggaatatcgatctgatggaacaggatatggatacgatcgtggagatgggatgtaatgtaattcgtattgcggaattttcctggcatatgatggagaagagggaagggcagtttgatttttctttttttgatcatgtgatcgaagaagcgaagaagagaaatctgaaagtgatcatgggaactcctaccgctacgattccggcatggcttgcaaagaaatatccggacattctttcggaatttgaaggaggaaaaaaacgttcctttggaggaagacatgtgtattgctttaacagtgccacaatgtatgcgtattcggaaaaaattgttcgtgctttagttgaacattataaaaatgaagaagcaatcgtagcatggcagatcgacaatgagatcggacatgaaggaagcgatatttgttattgtgaaaactgtcagaaaaaatttcagcaatatttgagcgaaacgttccaaggacagatcgatcggttaaatgatacatacgggacgacgttctggtctcaggaatacaattctttcgatgagattccaattccgacagagacaattacaacacataatccggcacttcgtcaggactgggagcgtttccgaagtaaagtgattgttgattttattgattttcaggcgaagctgatcaaatcaatcgcgccgaaagcagttgttatgcacgatttcccaggcggtggacttggaaaacatgtagattattcgaaagtggctgcgaccctggatcaggtcgcgtataacaactacccggtatggggcggtcagaaggaaccaatcgcaccccacgaaattgccttcggtctggattatatacgaggcttaaaaggggagaacttctggatcacggaagccatcatgggagcgcaaggacatgatgtaacgggattcctgccaagaccgaatcaggcaaaaatgtggtcctaccagggaatggcacacggctgtgattctatgatgtatttccgttatcgtggagcaacaaaaggagcggaacagttctgctatggaattttagatgcagacaatgtaaagagaagaaaattttatgaagtgcaaagcttttttcgggatataaaaaattatgacgcggcattaaaaacaccgattcgaaatcaggtggcaattgtttatgattacgattcgcttgcttctttccgtatccagaaacagagtattttgcttgatccggcagcagaaatgcagaaattttacaagccatttttcgatgtgaacgtaggagtggatgtcattccggaagaccgcgatttttcgaagtatcaggtgctcatccttccacagatgattattcacaaaccggaaatggaagcgaaagtaaaagcatttgccgaacaaggcggaacggttgtactaacttaccgttgttcggtgaaagatgcgaacaacaatgtaccgtttggaaagacggcaccggttggatacaatgagtttgccggacattgcgtagtagaaacagagagccttcagacgctggatgcatttccggttgtggggacaggcgcatttgcaaaatataacggcatgggcggtattttcagagacatgatcgaagtaaaagatgcagaaatcctcttccggtatggagatacattttacgattcatttgcggcagtgacaagaaaaccggccggtaaaggaatggtttattatattggatgtggactggaagaatccattacaaaagcactcatggagacgatcatgaaagagaaagagattccgatgtatccatctcaaaatggtgtggaaattgttacaagaggagaaaaggaacaacagatcaaaatgtatataaatcacaatgggacagaggcagaagaagacggtgtaaaactggcaccgttcgaatgtgtgattaaatcgataaattaacaggtaaaaatggaggtagaacagtgggtattgtagtgaacgattcacaaaatctttttatgctccagacgcgctctaacagttacgcgttcggaattgacaatcagggattagtgagacatttgtactggggaagcaggatcaatgcgatggaagatttcgaaatgccggagcttgcagaagtatctacgaacgatccggtatatgagatcacaaaagaagaatttcctgtatacggaggtcttcgatacaaagaacactgtctgaaggttacatttgcagacgggacgagagatgtggcttacgagtacgtaaattatgagatccagaaaaacgaacagtgtgaggaactggtgatcattttaaaagacaaacattatgcccttgtaatggaactgcattataaaatctacgaagcgtatgacttgatggaacgtttcgttgtgctgaaaaatgagtcgacagaagttatgcagatagaaaagctgcacagtgggcaatttcatgttccatatgaaggattgaattttagaaatgtacacggccattggggcgcagaacagcagaaattcgtgcagaaagtcgattatggaaaaatcattttcgaaaatagaagaggaatttccagccacaatcacaatccttatttcattttggatcaggatgccacagagacaaccggaaatgtgtactttggcgcacttcgtatgactggaaatttcagcggggcggtagagcagacacagtacggagagacacttgtgcagatgggaattaacacacatgatttcacatgggatcttaagccgggagaaagctttgcctcaccggaaattctctgtgggtattcagcagatggatttcagacaatgtcccacaacctgcatcagtttgcaaatgattttctacttcgggaaggacttcgtccggtactttataattcctgggaagcaaccggttttgatgtaacggttcaggagcagaaaaagcttgcagctaaggcaaaagagttgggtgcggagttgttcgtagtagatgatggatggtttggccagcgtcacggaattgataacggccttggcgactggtatgtaaataaagagaagttcccgaatggaatcgatgagctgatcgacgaagtgaaagcgcagggacttctgtttggaatctgggtagagccggaaatggtaaatccaaaggcagagctttatgcgaagcatccggattggatctatcactttgatacaagagagagcgacacatcgagagaacagtatgtgctggatcttacaaaaaatgaagtaaaagcgtttgtactggaaatgctggataatcttctctctaaccacgaaatcgactacatcaaatgggatgcaaacagaccaatctctcagacaaatttaaagaaagatctctggtataagcacatccaggcactctacgatattgtgaaggaaacgaagaaaaagcatccggctgtattgttcgaagcatgcgcatctggtggtggacgtattgattacggcattctcggaatttttgatgatttctggacgagcgataatacagacgcatatgaccgtctgtttatccaggatgcatattcttacatttatccgatcaaggcaatgcgtgcctgggtgaccgattgtccgaacttcctgtccaaccgtgtgattccaatgaaattccgctatcacagtgcaatgatgggaacacttggaattggatgtaatattttgaaatttacagaagaagacattgctctttctcaggaaatgatcgcacagtacaaggaaatccgtccgatcattcaggaaggtacgttctatcgtctgaatcatacgtcggcaaatgattatttcctatatgaatatatgaaaggaaatgagggcgtactgttcgcatttctcccacaaagcaagctgggacatcgtggagtgacagtgaaacttcgtggactggaagaaaatgcgtcctacgaacttcttatggaagatggcaaactcacaaagagtggaagttatcttatgaaacatggatttgacatgcggttgacgggtgactacgcaagcatgttgattcgtataaacaaattataaaaaagcaaaggagaacatcaaatgaaactttcaaacttttctaaattatcatttggtattggagcactgggaaaagatttatgctatgccattatttcgtatttcttaatgatttattttacagatacgatcggattgacaccgctttttgtcggtaacctgtttctggttgccagagtgtgggatgcattcaacgatccaatgatgggatttgttgttgataacacaagaacaaaatggggaaaattcagaccttggattttgattggtacggtgttaaatgcaatcgttttagtatttatgtttacaaaaccttccggattagaaggaactggcatgtatatatatttctctgttgtttatattttgtggggaatgacttatacagttatggatattccatactggtcaatgcttccgtctctttccagcacgaaaaaagaaagagattctatgtcagttatcccgagaatttttgcaagtacagcctggcttcttatgggtgcgtttgctctgaaacttgtatctgttcttggtaaaggagacagcgctgttggatattctgcacttgcgaaaattattgcagtgatttttgtaattacttctattattactgttgtatttgtaaaagaccgcagctgtcaggaagcggagtcgggtaaagaagcaaaaaggcttacaatcaaagatgcacttcatgttattgccggaaatgatcagctgaaagtatttatcggaattgtgctttgctacaatcttgttgtacagcttgccggtggtattgcaatttattacttcaaatatgtaaccggaaatgaaggcttatatccaatcttcacaactgcagcacagtttgcagagattgcagctttgttccttttcccaatcctttctaactattttacaaagaaacaggtatttgcaattgccagcttcagtcctgcaattggtctcgcaggagttgtactttgtggattctttgcaccacagaacatggtaattgtagcaatcagtggtatcttctataaattgggttctggtcttacattaggagcaacaaacgttatgcttgctgatgttatcgattatggacaggtaaaattaggaagtagaaatgaaagtattatcgcttcattccagacactgcttgttaagaccgcatctgcagtatctgcctggctgatcggtgtaggccttacaattgtcggctatgtagcaaacgcagaacagagcgcgtctacaatcatgggaatgcgagtattaatgggtgttgtaccttctgtaattacaatccttgcatttgtgatctacgcaaaaggctacaaactggaaggcgcatatctggaagagatcatggaaaaaataaaaggtaacaaaacggaagaaacagaagaatagaaaatgaaatgagatgaagaggtagcgcgctaagtattaagtgcgctgcctttttttgttaagacaatagtatcactgtatgagattgcgcatggaatttttttcactggtagtagtattttgcatatcataaatttctagcaacaacttcaaaacattataatccaaaaatgaaagaaagaggcagtgcgttaagtaggtgatatgccttttctcggttctgttattaaaaagttccgaatatgacaaaaatcggaggtggtgtgataaaaaagtgcaagcccccccctttttttatgagaaaataaaatcacttatatataatggaaaggggtaaggaaaaaatgaaaaagagaaggcgaatcttatcgcttgtctttgcagcctgtcttgtgataacgggaattgtttcgggcgcaggtgtgcagaaggcagaagcagctgcaagaacagaagtaatcgatgttacggattacggagtatatccggacagtgggaaggacagtgcaatcggaatacagaaagcaatcgcagctgcgaaagatgcaacgaaagagggaaaagaagtcaagattaatttcccggaaggacgctatgatatctatccagataaagcaatagaaagagaattatatgtttccaatactgtaggtgccgatcagaacaataaaatgaagaagatcggtatttttctggaagatatggatcatgttaccgtagatggaaacaactctctgtttatgttccatggtaaaatgacaacatttgcaacaatcggttgcgaagatgttgaatttaaaaattttgcagtggatttccaggttccgacagttattgatatgactgttgagagtgtagagggaaatacagcaactatgtatattcctgagtgctataattatgaagttgcaggaacaacgattaaatggtacagcgatgtaagtccttatacaggtcaacgttactggagtatctccgatctgtcaggttatcatacccagcgggaagataccgtacagggaatcaaattcggtgcaggaaatggaaatgctgcattaaaaggtgtagcttctattgaggatcttggaaatcatcgtgtaaagattacatataatagtaaagccggtgaagttcagaacggaatgtgctttcagtcacgtccgaccgtacgtgatcatgcaggaacgtttttctggaagagtaaagatattaagatgacttctcttgatatccaattccttcatggatttggtatggtaggtcagcattctgaaaacattacaatggaagatgttgattttgaagcaccaaaggaaagtggaagaacaacagccggatatgctgactttgtacagatgtccggatgcaaaggagcaatcaatattaataactgtacctttgcaggtcctcatgacgacccgatcaatatccacggaacatttaacacagttacatccatcagttctgacagaagaacaatcacagtacagtacaaccatcatgaaacagctggtttcccgaactttttcgaaggtgacgaaatcgagttcatgacaaagggaaatatgatcacagttgaaaattccgttcgcacagtaacaaaggttgacggaccggacggaataggcggaaacatgggtgaaggttcaggaagtctgacaaccatcaagctgacattggataaggcaattcctgccgacgttcaggtaaatcaacatgtggtagaaaatatcacttatacaccagctgtcaacatcagcaattgtgaatttaaggaagttccgacaagaggaatccttgtaactacaagaaaaccaattgtcattgaaaataatacatttgacggaatgagtatggcaggcatctatatttctgatgatgctcagggctggtatgagtcaggtccggtcagagatgtgaccatccgtaataatacatttacaagaggaaatgcacaggcaattttcattgagcctaccaatccgactgtatctacggaaaagaccgtacattctaatattaagatcaagggcaatacgttttttacgtacaataagagagttcttgatgcaaagagtgtagataaccttacctttaaaaataataaaatttacagacaggatccgatcaacggagatggatctctgagtctggcagtaaaagacggaagttctacagaactgaatgtagccgacagtgcagaactgaccgtaagcggaagtggtgataccttatcaggaaaactgtacaactttaatggttgtaaaaatgtagtgatcgaaggaaatgagtatgacggtggattgaatgccggaagttcaatcagcaacatgagtgcttctgatattacagtaaccaatgatgcaatgaaggtaaacgcagattccacaacagcaccgaacggaacgatgtactacgaatctgacaatgaaaaagtagtaaaagtttccagtacaggtgtcgtaactgcagttggagcaggaacagccaatgtaacaggatatatggttgttggaggacgtaagttcccgaccaatacagttacattcacagtcaacgcaggtgaacttggtaatctgccggaaggaatagagctgacagcagctgataacaaagaaaatattaaagtaaatgatacgatccagtatactgcagatctgaaatggaacgctgaagagaacggtgcagacaagaacagcgcagtgacatggaaggtttatgatgccaagaccggaactgagactgataaagcaacaatcactgaacaaggacttctgacagcagtaaaaccgggaagtgttgtagtgacagcatctacagccaacggctatgcagcatccaaactggtatcgatctggcaggaagggaagatgatcgcatcggatattacagtggattatccgacatcttccgacaaataccgtgcaagtgcgaccgtggaaggcggactggagcaggatttcacaagccagggactttaccagaatcagactccgagcaatgtccttgtaaaaccattgccggaaggaacagacagaacagatctgacacttgtattcaaactgacaggtgcaactcctgcaaatacatgggcagatgcaggaatctatctctatgatgatgcggacaattatgtagcactggaaaagaagcatcgtgatggctctaccagtgcagtagcacttgtaaaagagcagaacagaagtgcagtagaggaaccatataataactgggcaaatgtaagcacaaatccaatctggctgaaattggtaaaaaataatgccacagtgacagcttactacagtgcagataagaacaactggaccaccatcggttcgagaacagactgcggtttcctgagcggtaattttaagctggcaatcgcaagccagggaactaatacaggatccatcacttattctgatgttacagtgaataataaagaagtaaaattagttgaagaggcagtgaaaccgaccgcctccaatgttaaggtaacatatgacgaagctgctgacagcctgacagcggcaggagatactacaggacagtccgtaattgtaaaatgggcagttgctgataaagaaaatggaaactattccattatcagcggagtagagggaacttctctgacagcttctaaagcattgaaaggcaaatatgtgaaagctgcttatgtaccgctgatcggaacaggtgcagcaggagacattgtatggtctgatgcagtaaaagtaaccggaaatggcacagattcaggtgcatcagcagtcaaatctgcaaatgcagatctggcgacagctgacattaaaactagtgaaagtacagacatgttccagtttgtaaaaggaacaactttctatcagacaacagcaggaagtgacgttcaggaaatcaagtattcctttgcagcagaggatacaaaggcaacagtaaaagtgctggtgaatggaaaagaaacagctgaactgagcggaaacgcagttctcacaagcggaagaaatctgatcgaggtaaatgttacagcagaagatggcgtgacaatgaaaaaatatcgtttcacaatcagccgtcagggagataacaatgcattgttggaaagcctgcaggtaaatggacaagaagttgtgctggaagggggagtttatgaatatagtcttccaattgcaacaggaacaacaacagcgcaggttgcagcgacagcacagagtacaagagcaactgtttccatcgtgaacggaaaagaggttacatccgcagcacagactgttcagggagacgtgacagttgcaccgggaatcaatgagattacgatccgtgtgacacctgagacaagtgcagagccggtctactataaactgaaactgaaagtgccgaatgctgcaaatgcacgtttggaagcattaagccttggaggaaatatatctctgaaagaaaactttgatgcagatacattaaaatatacagcatctgcaacagaatccgctgtgacaatcaatgcaacagcagaagaggcggatgcaaccgtagaagttatctggaaagataaagtgattcagacaggaacaggaagtgcttcggcagaactgggactgacagaaggtgacaacactgtgaaagtgaaagtaacttctgcggacaagtccacagaaaagacttataaagtaacagttcatgcatcaggagatacatggttatctgatcttgactggacatcacagacatccggagattcaggtaatccgacaagaaaagataagagctgtggaaacaacacactgaccttatgggacggttcaaaggaagaaacctttgataaaggaatcggaagccatgcagattctacaatcatttacgatctgactggcaaaggatatacaagtttttcatcttattacggtgtagaccgtgagacaaagataaatccttctcaggcaagtatcacatttaaggtatatgtggatggaaatctgaagttcacaagtgatgtaatgggaactaacacagcaaaaggatttacaggtgatattgatataactgatgcaacagaactgaaattggttatggacaaaggtgcaaataactggagcgatcatggtgactgggcaaatgcgaaactgacaaaaccgtttacagcgccgcaaccagtagttgtgaccgttcaggtaaatgacccggtaatgggaagtgcagcaaccgataagggtgagtatcagaagtatgataccgctacagtaactgcaacagcaaaagaaggatatcatttcgtaaactggacaaacgcagagggaacagaagtcagtgatgcaaatccacatgtatttgatgtgacagaagatgtgacactgacagcaaacttcgcagcaaatcctgtagtaaagaaacagtatacagtaacagcaacagcaagtgctgaaacaatgggaacagtcagcatggatcatgaggacggaatctacgaagatggagaaaaggcaacagtaacagcaacagcaaaagaaggacatcatttcgtaggatggaagctgaaagatgcagaggatattttaagtaccgatgcgaagtatacatttaaggttgaaaaggatgtaaacctgatcggagtatttgagaaggatgcagagcctgagcaggtgataactgcagaagaaatcatgcgtcgtattattgcagataaatcttttgcaacttctattaagaaagatacgaagaaactagtattaccggaagtaccagaaaacgcacagattgagatttgtagtgtaaatccagaaggaattatcgcgctgaatggcgaagtaactataccgcaagaggatacagaagtcatcgtaacagtaaaggtaactggaacagatggaagtgttgccactaaagagtttaaggttatggtagaaggaaacggtgagacagagaaaccaaatccagagaaaccagataatggaaataataacagcaataacaatggaaatgctggaaataatggcaatagtggtaataacagcgctaatggaaatgtgaatcagagtggagcaaaggaaaataatgctaatagctcaactccgaatggtggtgcaggacagaacacggtaaaggcaatcaagactggagatacagcgaatttcgcattgtatggaattgtaatgatagccgctggggcagtaatcgcaacacttgtatatcgcagaaaaagaagctaatctagatgaacagaaacagaccgttatgaattacggagctgtgaaaagtaaaaaattatagaagactgccgggatattctgaagagtatcccggcagtcttctataagaaaccacttcttggctgtaatggtttatattccttgaatgcatgttacaaccacagaacattataatccaaaaacgaaagaaaggggtagcgcgctaagtgagtgataagccctttccaggttctgttattgagagttccgaatatgacaaagaatcaggagggatgaaacaaaaaatacgagttgtattcttatttttatgagatactaaaattaactatatataatgatttctcgctcggtaaaagataaatccagattccaaaaccgttcaatgatatcccaggtggaacgagcaagagtatttggataaggataatatttacgaagattccgagagattaataaggaaaaggaggaagagagtaggctataaaaagtctaaaaagaaaaaagtatgaaaaagtataatttaaaaagaaaaggtatggcagcagctgcactgacacttgcctttggaatgtttactccaagtgtttcatttgcggcaggaactccggtcaatgtgctttctgaaacagaaagccagatgagttctgataaagaagttgtttatgtaaacaattattcggcagcaaaacgagatgtcaattttaatgacaactggaagttctatttgggagatggatcaggtgcggaagaaccggcatttgatgattctaaatgggaacatgtaaatctgcctcatgactacagtattgaacaagagtattcaacgaagatggaagcagaaagcggatatcttccgggtggaattggctggtacagaaagagtttcacgcttggaaaaacagcggagaataaacgtgtgcgaattgattttggtggcgtatatatggatgctacagtttgggtcaatggaacacaggtgggaagccatccgtatggatatactccattctcatttgatatcactgatttggtgaaatttgatggtgagaatgtaattacggtaaaggtaaatcatcagacaccatccagccgttggtattcaggaagtggtatttatagaagtgtagatttgaatattgtaaatcctgtacatgttgacttatatgggacaaaggtagaaactccaaatttggaaacagaaaaagacggagcggtgactactaatattaagacaactgtagccaacgattcagacagagaacagaatgtgacattgactcataccattttcaaaaaaggtggggagccaagcgctaatatcggaactgtgacaacagaaacaaaagcgattgcggcaggtgaaaccgcagcgattgatgcaacagtaaatgcacagaatccagaattatggagtactacaaatccggcgctttatacagtgcgtacagaagtaaagattggtgaagaggttgtagatacttacgatacagaatatggattccgttattttaaatttgatgaaaatagtggattttcattaaacggaacaaatatgaaactgaaaggtgtgtgtatgcaccacgatcagggagcgcttggagcagaggcatggaaacgtgcaattgagcgtcaggtggaaatcttaaaggaaatgggatgtaactcaattcgtgttacacataacccggcagcagaagaactgataaatatttgtaatgaaaaaggtatccttgttgtagaagagatgtttgatggctggcaaaatgctaagaatggaaataacaatgattatgccagatttttcaatcagacaatagatgaaagcaatcagattcttggaaaagaaaatggaatgacttgggcaaaatatgacttaacagcaacagtaaaacgtggttggaatgctccgtcagttattatgtggtccctcggaaatgaagttcaggaaggtgcaaccggtgtattgacacaggcgtatgcaaatgttcaggcgaatttgattgattggacaactgcgttggataccacaagaccggcaacacgtggcgacaacgtgttaaaaggtaataagattggaataccgaaaaacatgatggatgctatgacaactgcaaatggtacggttggtttgaattattgttctggaaatgattatgatacgcttcataatagtaacccaaattggaagttgtatggttctgaaactgcttcagcagtcaatagtcgaggtgtatatgacagaatagatggaagtaagacgggtcagaagttaacatcctatgataattcagcagttaactggggggcagttgccagcagtgcctggtacgaggttattaagagagattttgtggcaggcgaatatgtatggaccggttttgattatattggagagccgacaccatggaacggaactggaaaaggagcacaaggaacatggccgtctccaaagaattcatattttggaattattgacactgcaggatttccaaaagatagttactacttctatcagagccagtggaatgacgaagtaaatacccttcatattttaccggcatggaatgaagatgcagtgaagaaagatagcagtggaaaggttccggttgtcgtttatacagatgcgaaaaaagtagaattattctttacagatgcaaaaacgggtgataagaagagccttgggacaaaggaatttacacagaaacagtcaaatacacaagggtatacatatcagtattatgaaggcacggataagtctggtacagaacataagaatttatatctgacatggcaggttccgtataaagcaggtacaatttcagcagtagcttacggacaggatggacagaaaatttcagaggaaaaactgaatggtcgaacatctgtaacaaccaccggtgagaagaagaatttaaaagctacagttgaccgcgatacaattgcagcagatggagcggacttaacttatgtaactgtagatgtaacagataaagatggaaatattattccgaatgcggaagataaagtaagctttaaagtagaaggcgaaggtaaactggtgggtattgataacggaagacaagacgatcatacctcctatcaggcaaatagcagaaatgcatttgcaggaaaagtactggcaattgtacagtctacaaaaaaagcgggaagtttcacagtaacagccagtgcaaaaggtctggaaacttcttcagtgacagtaacaacgacttcggtagaacaggatacaacaggagaaaaggctatcagttattacgaaatgtctaaaaactactatgtaaaaaccggtaatatgccacagcttccgagtactgttaaagcagtgtatacagatggaagtgaaaaagagattcctgtaacatgggatgcaattacagaagaacagattgcacagagtggtacattttctgtagcaggtacaacagaggcaggagatactcttacagtaatcgtcaatatgattgaccaggtagtttccctgctgaactattcaacaactgttccgcttggaacgaaaccgacacttccggaatctagaccggcggtacttcaagatggtgaagtaatgaatgcgtccttcccagttgcttggggagaaccgaatggaagttacgatgcagaaggaattgtgacagtgaaaggaacagcagatgttctaggacagaatgtagaggttacagcgaccattcgtgtagaaaaacagaagatagagctaggctccagtgtaagtagcgcagcatacttaagtcaggatgtaccggaaggacaacagtcagatacactggatgcaattaaggatggaaagaaagaaattggagacaacaacagtggaggcgcaaatccaacttgttggtcaaactgggcaactagaaatacagatccaacttctgaaatcacattccgctatgctactcagcaacgtgtaggaaaaattgttgtatattattccaaagataatggtgcaatgacattccctcgggaaggaagaacaaaactctttgtatctgaaacaggagatgaaggaagttggaaagaactttcagtggaagaaacaattgcggaaaatgaaagtccagaacgtgtaaaagcatatacatatacatttgatccaactgtagcaacttttgtaaaactgcaagtaacaaatacaactcctcaagaggcaggaaaaacagaaacatgtactggtattacagaagtagagattattgagtggaatggttcatatacgaccaattctactgcaaatctttctaaattaacggtaaatggtcttgagttaagtgaggaagaacttgctgcaggaagttttgatacagaagctattgttattgatacaatagactatgtggcagctgataatgcagcggtaacttatgtaccgccgtatgaaaataaagcgaagctaatcattgaatcagaagatcatacaaccagaaatgaatttgtcatcaacttagacggaaaaggtgttggaaatacagatccagtttatgcaggacgggattatgatacccaaaaaatgtcggtgacagctggaagtgaacagagtggacaaggcaatgaaggtccggcaagatatgttttagatggcaatgaaggtactatctggcatacatcatggaatccgcaagcgagtcgtgatacattttggattaaatttgagttaaatgaaattactagcctagatgcattacgctacaaaggacgtggtggtgcttcaaatggacgtatcagtaagtatcgagtagaggtaagtaaggacgatcaaaattggacagaagtttctgttggaaattgggataatacagatgactggtatatcgcaatgtttaatgaaccgacagaagcaaaatatgttcgacttaccggcgttgaaacttatggtgaaggatcacagcagaataaatttgcaagtgctgcagagattcgcttgcgtaaagcagattcaaagacagacatttcagatgcaactgtttctcttacaaatgagaaaaaactggtttctgttgtagataaagatcatccggtaacattgtcaaaagaagacattgaagttaccttgggagataaggtgctcagatatggcatagactacaaacttacttataataataatgaggcaccaggaactgcaactgcaatcgtaacaggtattggacagtatggatatacaggaagtcaagaggtatcatttacaattgagttgaaaaaaccggaaatgaataatatttccataaagagcttcccgacaaaaacaacatataaagaaggagaaaccttagatcctacaggtcttgtacttactacatcatatgacaatggtacaacggcggatgttgtatattcagaagagactgcaaaagactttgcatttaatccagatacaaagacagcgttgtctaaaggaaatacaaaagtaacagtgacctatggtggttttgaaacagagtttgcaatcacagtgacagaagctaagaaaccagatccagaaaagccgggtccagaaaagccagatccagaaaaaccagatccagaaaagccggatccagaaaagccgagtccagaaaagccggatccagaaaagccgaatccagaaaaaccgaatccagaaaaaccggattcaggaaaccagggttcaggtaaaccggacggaaatggtagctccaaaggaaatacaggcaatacaaacaattcaaataatgcagtacaaacaggggatactgcatcagtaggaatttgcgtagttgcattagcagcagctggtatagtaggaatagtaggagctataatgattggaaagaaaaggaaagatgttaaataatcaatttgaagagtattatgtgacaatccttttaaggaggaaattttgaaaaaattacgaattgatagaaagaacaaaaaaggctttcagaaattcgctgcaggagtcatggcattagtaatgactgtttccggactgacaatatcgccagtccggagtgaagctgcggctgcagagtatgaaatttatccgaatccacaggtggttcaatatacggaaggtgactatgttatcaaaaacgaggtcaatgtagtatatgaatcaggaatcgatcaggcaacgaaagatcgattagcagaagcacttgcgttgaaagacggggtaacagtgaccacatccgagtcaattgaagagggcaagacgaatattcttgttggaattgatggttcgggagaagttgcagatacttatgcaaatgaacatatgaatatgcagtcagcggatttgtatgaaaagctggacgcctatgtattggatagtaataatgatgtgattactgtagtaggtgcagacacagatgcaagttattatggattgacgacgttgtatcatattttgaagcagatggatagtaataccatccggaattttcacattgaggactgggcagatgttgcaagtcgcggatttattgaagggtattatggaaatccatggtctacagaagatagaatcaatcttatgaaatggggcggttattataaactgaattcctatttctatgcaccgaaaaatgatccaaagcataatgcaaaatggagagaattatatacagaagaggaactgaatacattaatcagacctttggcagaagctgggaatgcatctaaatgccgttttgtgtatgcacttcatacgtttatgtataatccggttagatttgacggcaattatcaagctgatttaaaagcagtacaagataaacttgctcaggtgattgatgccggtgtcagacaggttgcaattctggcagacgatgcgggaaacgtaggtggaaataattataataagtttttaacggatatgacagcgtggctggcagaaatgaaaaaaacatatccggatttgaaacagacgttgccgttttgtccacaggaatatatgtacaacggacaggcatattacaaaaatttcccggaaaatgtacaggttgttatgacaggcggtagagtatggggcgaagtaaaccagaactttaccaatacatttacgaataatgcgggacgcggtccttatatgtggattaactggccttgtacagataattctaaaagccatctgatcatgggcggatatacaacattcctacatccaggagttgatccggcaaagattcaaggtatcgtacttaatccgatgcagcagtcagagccaagtaaagtggcaattttcggaaatgcatgttattcatggaatatttgggaaaatgcagatatagcaaacaaggcatggcaggattctttcaaatatgtagaccacaattcagcagcgaaaacggaagcctctacagcgttgtatgaattgtctaaacatatgatgaatcagaacatggattctcgagtaacagcattgcaggaatccgtagatttagctccgaaactgacggattttcgtgataaattaaagacaggtacagttactgtagaagaagcggatgcattgattgcggaattccagattttacagaatgcagctgctgtttatagagaacaggctgtagacataaaggttagagatcagattgtatattggctggattgctgggatgatacaactgtttcagcaattggatatttgaatgctattaaggcaattgtcaatgaggatgcagatactgcacttcgttataatgcagaagcaaaagctgcattcgagcagtcaaagacacatgaactctggtatctggatcattatgaaaaagcagaagtcggagtacagcatattgttccgtttattaaagcgatggcaaaatatgtaactgattatattgacaccggaatcaatccaaatacacagaaaagatatacaggaactgttacatatgagcagatatctatacaaaataacgcatcggaagataaatattttgatggagataacagcagtgaagtatggctggcaaaaggaccatacgaaaaccccggaagagatacaattccagcaggagcaacattgacagttactttcccggagccaaaaacaattggttccttccgtttggtgcagggagtttcagcaaagagtgataagttcagcaatgcagatgtagagtatcagattgagggaacgagtacatggacaaaagcgggtacattgtcggataaaggtgatcagaccatttcattcggaaatgttgctaatgtaaaagcggtgcgtattcataataatacagtaacaggaggctgggtaagaattggtgaaatagagattctttctccggcaaatgaagatgcaagtggtgcgagagcagggctttatacgaacgttgatacaaatatcactgcaagtctggaggaaggcagtgtttcattaagtaacggaacagttacattgaacaaagacgagtatatcggagtgaaacttggcgatatcaaagcaatacagaatattacaattccagcactttcggaaaatgtagttctggagacgtctatgaatgaaatcacatggcagccttacgcagcagatgcaaaaaatgtagatgcagcgtatatacgcattaaaaataatggcgaagaagcaagccagattactttgaatgattttaaagtgacttataagtttgtcggagctaaaaaagtagatacagactttgaaaaagcacaggatgcaaatgatatgcgtgtggcaggaactgttggaaatgtatttgatggaaaattaagtacattgggtatgatcaatggaaaacaggaagccggcaaacatatcacgtttgatctgggacaagttattcactttaactctctgcgttactatattgtagaaacgcagctgaattatttgagaaatgcaaaatttgaagtgtcaacagatggtgaaaattggacagaggttatgacagttggaaaaccaactcaaaatgtgcatgataatacagtagcgaaagacatgcaaggcattactctgacccatgatgataaaaatccgggatatatgtataaagaagcaacagggctgaatgtagatggaagatatatccgcatcatgccgaatgaaacatataatcatagatgggttgcaattaatgaactgcagatcaatggaggagaatatatttctcctgagcagagtagacagattgtgtcagaagcaattgaagaagtaggaaagcttccgtctaatatgcgggatggaagttatggtacaacttataagtcttctaaaaagaacagttcatttacctggagagtgttagatccaacatcaatcgcatctgttcgtctgatacagatcggcgatatttctaaagcagatgttacagcaacttatttagataaaagtaatgttacaaaagctagtgaaaaagtaaaccttggaaaactgaatcaagtaatcaatgagtttgttattccagaaggaaaaatgctggaaacactgacggttacttggaaagatgtaattccggaaattgctgagattgaaacttcatcagaacgtggcggagaagtaaacaaagaaacattaaaagcagaacttgcaaaagcagaggatgacacatggacagctgatagcaaaacagcttacacacaggcaaaagaaactgcacaggaaatctatgataatgaaaatgcaagtcaggcaatggtggattcagcgattaaagcattagagtcagcacgtacaaatgcaaagacaaaagcgaatgaagaaaccgtcgcaaatatgaaaaaaatgttggctgaaaaaatcagtaatgaggaaacaatttatacaaaagttacttattctgcatatgcaaatgtaattggcaagttggaaaaggcaatgaaaactccggataatttgtcgcagacagatgcagatgagctgatgaaaaatgtgacagaagcgcagaataatcttgtctattctacaagaaacagagaacttgcagagctggaaacgaaaaaatatgatttagttgaagcagatccgtatacaaaagctagttatcaggcgttgacagcgattaaatcagaaattgatacgttggtggctacggataaagaggcagaaatagccggaacagaacgtgtaaatccaaaagaatttattgctaagagaactgctttccagaatagaatgtcaaatctagttgatatcagtactctgaaggcagcgattaaacagtcagaaagcgtagacggtactttatatacgaaagaaagttatcagtcttatgttgcagctgtagaagcaggaaaacaacttcttgatgcaggtacaaaagaacaggttgcacaggcgctgaaactaatcgaagaaaaatataatggattgactacaagtgataaagcagctttggagcagatgattcaggcagcgaaggcattgaaggctgaatcttatacagaagactcttataaggaattgatggatattgtcgcagaggcagaaaagagcgctgatgataaatatattgataagattcaagaggcaatgaaaaaactggttaatgtagaagcattaaaggataagattcaggcggctgaaaaagtggataaggagttgtatacagaagactcttatcagagattagaagatgcattgaaaaaagcgaaaaaacttctgaagtcaggtagtgcaaaagaagtaaaagcagcaacagaagaattagaaaatgcacgtcgcgcattggtacagaaaactacagtagatgtaggaggaaatcaaaataatgcaggtcaaaatacaaatcaaaaaggtcaggcagtgcaaactggtgatgaaggaaatcttcttccgatagttttggtcatggtagcttgcatagcaataattacagtagtgattattcgcaggaaaaggaaatagggggtaagaaataaaagctcactgttggtattttttgaactagcagtgagcttttgtagagaaatttaaatgaatttaacagtgtagtcatctatacctgaaaggaagtattaataatcctgaagctatttccttaatttttttcatgtgtattttctcctttaaatttacattatattttgcattatagccatgcagtaactaaagaatgtactgattgtggtagatgatatagaaaaatccatagagttttatagggatttatttggcttgcaagtgattcttcagaatgaaggaaatgtgattttatcggagggccttgtgttgcaggatgcggacgtatgggggaagactttggatgagatctcgatgccattcaataatatgatgagcaacattgatgtgtatgtcaccggaagcaattctaagtttctgtccagcgacattgtgactgagttccgtggcagaggtgatgagatcagaatctatcccctctcttttgcagaggtttattctgtctatgaaggtgattacgacgatgcctgggatgactacatgatctatggaggattgccgcaggtcgtaggtttacagagtgaacgacagaaggcagattacctgaaaaacatttttgcaaatgtttatctgaaggacttaattgaaagaaacaagatccaaaatgtggatgaaattggcattctggttgatatgcttgcatctgcaattggagcactgaccaacccttcaaagattgctaatacctttgccagtgagcgtcagatgagttatacaaataaaacgatttccaatcatattgactatttggcagatgcgtttttgatttctaaagcaaaccgatacgatattaagggcagaaagtatattggtgcaaatctgaaatactactttactgatccaggcctgagaaatgcccgtttgaatttcagacagcaggaacctactaacatcatggagaacattgtttataacgagcttctgattcgtggctacaatgttgatgtgggtgttgtgcaaatctttgataaagataaagagggcaagcgtgtccgtaagcagctggaagttgattttgtagttaaccaaggcaatcagagatactacatccaggttgcttatgacatgacttcagaagaaaagcagactcaggagttcaattctctgcgtaatatcccggactctttcaagaaggttgtcattgtaaatggcagcaaaagaccttggagaaatgatgagggatttgtcatcatgggaatgaaatatttccttttgaacgcggatagtttagagttttgacattggatagaacacattggtgacaggcactatgaagcataagtaaatagcgattcaaatttcagtgtagatagttgagaggaaggtgttttgcatggcaaaaatagaaagatatataaatgaagattttgatcagttgctttctaaaattgaagacggaataataaatggtagtatgtctgcaacgctagaagatgccagtgactttcgaagtggaactgcgcgttgcagcgttcgtgtttttgagcgttacagctatgcaggaggaaacagagtgagtcttaatattacactttttcaaaatgataaagatccagtacaactttctgcaattacagcaggaggaagccaagctgtatttttcaaaattaatacatggggggaagaggcctttcttgataagttaatcgagttgttggattagttctaatcgttttatttgcaatattattgcgaaaaaaataattaaagttttacgagggaggcaaatcagcatgaaatgtccatattgtggtgaagaaatgataagaggatatctaatgagctcacgagacattacttttgcagttgataatctgacaaaagtttttcgtattaaaaaatcggacgatttggaactgagtaaaggttcaggcggaatccctcattgcgaagcttatcgttgcagtagttgcaaaaagattttgattgattatgcaaatagataaattcaatttgtagaattcaaaattttatatgaaatgtgagatagtgcgtagtattgtcaagagtgcttatagacgataagtgataggaaggtaagatatatgattaaagaaattgagaacagaaggagtataagaaaatataaaaggcatgagatcagtaaggaaataattgaagatataatttacagtgcgactcttgctccatctgccaaaaacagacaaccttggaaatttattgtatatcaaggtgaagaaaagtctaagctggttgatgttatgcaccagggaataaagtcagaaaaaatcactcataaacttatgccagaatgggcatttgctataccggatgctgagaatactgttagagttatggaagaagcaccatgtcttatatcagtgcttaatacaaatcagaaaactccatttgatagtattgaagatgaaaaacgtattgtggaaatttgtgattcgctatcgataggcgctgctattgaaaacatgatattgactgcgacaagttatggattaggtacattatggattgcaaatacgtgttttgcatataatgaacttatagacttcattgaaacagacagccagttgacaggaattgtcgctatcggatttgcaaatgaagccccagccaaaagaccacggaaacctttgacagacattgttgagtacagataaataaaaaattcttcctacatttttttataggcgttccccattcgaccattgagtcgagaataggtttcagagtaagtccaagttcgcttagactgtattcaactcttggggaaacctccggataaactgtgcgaatacggaagaggtgatgaaaatgaatgagcttgatgaaatcactagaaattaatatagcagaataaaggttgtttagaaattccgttgattgtgaaagaagaaaaagagagtatgaaagaagttagtaaaggtatcctcaaatgacacagcatattttatgtctaaaagaaaagtatctgttgaggataagatatacgctgtaaatctatatctggatggaaaagaaagccaacggcgaattgccgatatgtttgatgtaagtctcgcatctgtccaacaatggattcgaaactatgaatctatgggagcaaatgtattcacattgaaagggaataaaaagtattccaaagaattgaaacaacaagcagtcttagattatttagcaggctatggttctcaagatgatatttgcaaaaaatacggaatccgttcaaaagctaagttacaaatctggataaagaagtataatggtcatgaagaattaaaatcttctggaacaggaggaagcattatcatgaccaaaggaaaaaaaactacttttgaagaacgggttgaaatagtacagtattgtatcgcacatgatcgtaattatgcccaaacagcagaacaataccaggtgtcctatcaacaggctcgtaattatatagtcaaatatgaagctggtggagtggaagctttaagagataaccgtggcaaacgaaaacatccagatgagatgagtgaattagaaaagctgcgtgctgaagttaaaattttaaaagcagagaaagcacgtgctgaaatggaggcatctttcttaaaaaactcgaagaaatagagaggaggcggggctaagcctgattcgtcatgaacatatatatcaggcaatcaaagaagaacacaaagaacataattatccaatcgctgcactttgtaaacttggcagagtttccagagccgcttactataaatggttgcatagagaaattcctgaaagtgaacaaaagaatagacttattgctgatgagatagaaaagattcatacagagtcaccggataaaggctatcgaaggatcagagatgatctggaacgatatcatggtattgatgtaaacgataaacgtgtgctacgcatttgccgtaaacttaatataaaatcaactatcaagtattctaacaacgggtgcacaagacaggctgcaaaccctcagtatatagctgaaaacatacttaatcgcgagttcactgccaaagcaccaaatgagaaatggctcactgatgtgacaggggatttcaattgtctacttgacggggagttctcttcttttgtaatattgaagaaatgtatataatagaacttgtgtacattgaaggaatgcatgttttacgatatgatatgtttatataaagtgttgaaaccgttttatctcttaccttttctggtaaaataagataaacaaaatcggaaattggaaaggaagcttgaattataaaattatgaagcgaggtagtggatatggaaaaagacccgtttaaggaatatttgagggagtctgaaccagataaagctcataagggttatgcttggagtacggccatcggacttcaggcagtggacggactcaaaccatctaaatatttgattgatactgccattcagaatattgaaggcaaaatcacaatgaaagaagcacagagtcttatcgacagttactatgaagaaagaccagtgcatttgtctgacgatgagcgtactgaagaagcagataaggtttcgtcccgtattgcagaaattctttctgaaacagcgtttacattttctccgaatgagtatatcgctatccaccgcaaactctttcagggcatttataaacacgcaggaaagattagagattacaatattacaaagaaagaatgggtgcttgatggggcaactgttatgtacggtagtgcttctgaattgagagccacacttgaatacgatttttcgcaggagaaagactttagttataaagggctttcaatggatgggattattcatcatcttgcggtatttgtttcaaggttatggcaaatccatatcttcggggaaggcaatacgagaacaacggcagtgttcttcattaaatatctaaggacacttggattctctgcaaccaatgatatttttgcggaaaatgcgtggtatttcagaaatgcacttgtccgtgcaaactatacgaacctgcaaacaggtattcacgaaacaacagagtatttggaaacatttctcagaaatctgcttttgaacgagaaaaatgagcttcatagtcgaaatcttcatataagtggacttttgaatgaaggaaaagtggacattcaagatcgaaaagtggatattgagaatgaaaaagtggatattcaagacgaaaaagtggatattgaaagtgtactttccgaaaaaggcagtgctttctcagtaaaaacgacagttcatattcatagactctttgaagagtttggctttgatgaggtatttggaagaagtgcagttatgaagcttctcgagctgaaaggttcaggtgcttccaaacttctttccaatttggtgcaggcagagattattgaatctgtatccggttacggaaaagggaaatataaatttaagaggtaatcgaggcagtgtaaaggggcagattttaaatatacttgatggatgttcagaactaattcgaaaaaactgaagatacagaaggactttcaatggacgtgatgtttacaaacagttaagtcaaacgaaaggcgtttcagaaaataaaagctttacattataaaaagtattatgataaactgaatatcaaactgaaaatttgcggtgtaggagattccttacaccgcatctgtgttttagaaagtagaggaatgaatatgccaataggagttattatcaatgctttgtcgattgcagccggcggtgcgatcggggcattattcgggcacaaattgcccgtgaagtttaatacagagcttactaagatttttggtgtctgcgcaatgggaatgggtgtcagttccattgggcttatgaagaatatgcctgctgttattttcgcagtaatcattggaactgcctttggtctggcagtcaatctgggcggaatgattaatagcgcagcgacctgcatggagaaaccagtgggaaaactcttcccaaataagaacaaatctatgtccagagaagagtatatgtcaatgctcgtgacgatcatcgtattgttttgtgccagtgggacaggaatttacggttcactggattccggaatgagtggagatcatacaattttgatttcaaagtcgattctggatttctttactgcaatgatttttggaggaacattaggtatggtgattgtagcagttgcgattccgcagtgcgtgatttttctgatcatatttgcagcagcaaaacttatctttccgctgaccacgccggatatgattgccgatttcaaggcatgcggaggcttcctgcttcttgcaactggttttcggatcgcaaagattcacgatttcccagtcgcagacatgatcccggccatggtgcttgtgatgccggtgagctggttctgggtaaatatgatcgtaccgatgctgtaaaatagaagaaaacttatcattctatatttcagcatgttccaatacataattcttaaagttcgtaataacaggtgcctgataaacattcttcaaagttgccatgtagaagagtctctcccaggacggagtggcaatctctatgattgaaaccggcaaggaggaaagaatcggcattcgtggtacaactgcgatgccgaatccggcactgactaatccggcaaccccctgatcttcttccatcgagtaagcaatctgtgggtatccgccacaattttcaaataacttgtcaatcacatgtcttaaaccgcttcgcttagaaaaaacgatatgtggatacgtaagcgattcttttagattaatcgaagtttttccgtccaaaggatgtcctttaggtacaatcagtacaagctcttgttttgcaaccggaacaaactcaacgagaggttcgttgtccatcttggaacaaaatgcgatgtcgtattttcgctcttttaatccctggatcatgtcggaagtaagtccggtcgaactgtgaaaatgaaaatcaatctttttgttaggggtggaatctaaaaaacctttcacaaagttcggaacaactgcactgctgagcgtacggagttgaacaatatcgatgcggccttccccaaatccggtcatctgcagtttattgatacttgaatccagcatatccaaagcctgttccacatcaacaagaaaagcctgtccacattttgtgagtacaacgttacgtccatctttttcaaagagttttactccgagctcactttccagagatgagattgcatgacttaagcttggctgagtgatagaaagaatctccgcagcctttgtgtagtgttctaaatgagcgagagtaacaaaatatctaagatgatagagattcataaagtctggtaccttccttataaaaatttgtatctcccatttaatctggttcattttatatctatttggtaactgttcagagccaagcaaaatttcataaaacagatgtaaaatgcttgcatttttaagactgtttttgaaattttatttggcggatacgccacaccgacgaaatgcgtagcattttggaggttggctctgaacagttactctatttgagggataaatacgcaataatgcttattgataataatatcgtaacacgaagtgtaaataaaatctataaacaaaatgcatggattgtgatagaattactaatttgtcatttatttaacaagcagatataataaaaccagaaaaaaataacaagattgaacaggaaaatccaatggattatattcaatttttacaatggaggaagaattatgtcaaagaaaaacccaatcacagtaagttcatggacacttggagatcagtgcaaatttgaagatcgtgtaatcgctgcaaaggaagcaggatatgaaggaatcggtcttcgcgcagagacttatgttgatgcattgaatgaaggacttcatgatgaagacattcttgcaattcttgacaaacatgatatgaaagtaacagaggtagagtacattgttcagtggtgtgaggaacatcgttcttatgagcagaaatacaaagagcagatgtgtttccatatgtgcgaactctttggagtaggccacatcaactgtggactgatggaaaattattctgttgagtacacagcacagaaattaaaagaactttgccagagagcaggaaaatacatcattggtgttgagccgatgccatacagcggaattccggatcttaagaaaggatgggaagttgtaaaagcttctggatgcgacaacgcaatgctcattcttgatacatggcactgggtaagagcagatcagccatacgatatccttacaccggagattgccaagaaagttatttctatccagatcaatgatgcttatgaaagaccatatgcagcatctattttaagagatgagtctatgcacgatcgtcttgcaccgggaacaggagcaaaagatacagcaggatttgttaagatgatcaaagacgcaggagttgatccgaaggttgttggtgtagaagttatttctgatgcaattcttggaaaaggactgaaagaagcagctgcttatacatatgaaaatacagagaaagtattaaaagaagtttggccagagttggtagactaatttgaaaaaacagatgatgccaaagagagaggtaaaatgatgaaattcaaaaatatgttttctccgattcagattggacctatgacagttaaaaatcgttttgtggttccaccgatgggaaataatttcgcaaattcagacggaacatggagtgacgaatctgtggcttactatggtgagcgtgcgaaaggtcagtttggtctgatcacaattgaagcgactgtagtacataaaggagcgaagggcggtcctaagaaaccatgcctttatgatgacaacagcattgaaagcctaaagaaaattacagatgcctgccatgaagaaggtgcaaaggtatctatccagcttcagaatgcaggaccggaaggaaatgcaaagaatgcaggagcaccgatccaggctgctacagcaattgcatcagcagatggaagagacattcctgaagaagtatctacagaaaaagtgtatgagcttgtaaaaggatatggtgaagcagcagaacgtgcaatgaaaggtggagcagatgcagtagagatccacatggcgcacggctatcttgtaaattcatttatgtcaccaagaacaaataagcgtgtcgatgaatttggcggaaactttgagaacagaatgagattttcacgtctcattattgaagaagtaaagaagaaaacagaaggaaagattgctgttcttgcacgtattaacagtacagaagatatgtttggaggacttgataatcacgatatgtgtgcagttgcttcttatttagaagattgcggaattgatggtcttcacgtatcccgtgcagtacatttaaaagatgagtatatgtgggctccgacaggaattcacggcggattctcagcagagcttgttgcaaatatcaagaaatgtgtttctattccggttattacagttggaagatatacagaaccacagtttgcagaacagatcgttaaaatgggaaatgcagatttagtagcatttggacgtcagtcacttgcagatccgcacacaccacagaaagcaatggaagaaagattggaagatcttacaccatgtatcgcctgtcttcagggttgtgttgccaatatgtatgcaggtaaaccaatttgttgtcttgtaaatccggtacttgggcatgaaaaagaaggactgccaaagactgagaaggtgaaaaaagtttacgtgatcggcggaggtgtagcaggtatgtgtgctgcatttacagcgaagagacgcggacatgatgtaacattatttgaagctacagataagcttggcggtaatatgagactggctgcatatccgccaggaaaaggtgatatcacaggcatgatcagaagttacattgtaaaatgtgaaaaagccggagttaatatcaagatgaatacaaaagtaactgcacagatgttgaaagaagatacaccggatgcagtgatcctcgcaacaggagctgagactttagtacttccatttatcaaaggtattgaaaatccggatatcgtttatggtgttgactgcctggaaggaacacgctcgataggacataaagtcttagttgttggtggcggtatggtaggtgcagagacagcagacttcttagcagagcagggacatgaagtagccattatcgagatgagagatgcaatcggaccggatgtgatccatgagcacagaatttttcttatggaagcatttgagaaatatggcatcaaacagattacaagtgcagctgtatcagaaatcttctcagatggtgtaagttacaaaaatgcagcagataaatcagacgagacgatctacgaggcaagaggattcgatacagttattctctctatgggattcagctcacgttatacacaccgtgatggacagaacgtagtttatgatttcgcagaagaattaaaagacatcgtaccagaagtccacatggtaggtgacgcagtaagagcacgccgtgcactggatgccacaaaagaagcatatgaggttgcattgaatttataaatgaaattatatcaggaggattagaatcatggaaaaaagaatttctggacacacaggcttaatgggattatttggatcaccggttggacattcaggatcaccggcaatgtacaacttcagtttccagcatgacggattagattatgcatatctggcgtttgatgtaacagaggaagaaatgccaaaagcatttgaggtaattcgtttattcaaaatgcgcgctggtaactttacaatgccatgcaaaaatattgcagcaaagttagtcgacaaactttctccggcagcagagatcatcggagcatgtaacgcatttgtaaatgataatggtgtgatcacaggatacattacagatggtgttggatttgttaaaaatcttgagatcaacggtgtatctgtaaaagataaaaagattgttgtacttggtgccgggtggacagctacagctattcaggttcagttagcactggacggagcaaaagaagttaacattttcaatgtgaaagataaattctatgaaagagcagaaggaacaaaggctaaattagcagagaagtgtccggactgtgttgttactgtagatgatcttgctgataaggcgaaactggaagaagagatcaaaacttgtgatattcttatcaatacaacgattatgggaatgaaaccacacgaggatgtaactctggttgacaaatctttattccgtaaggatcttgttgttgcagatactgtatacaatccagagaagacaaagatgatccttgaagcagaagaagcaggatgcaaagcaattgggggcgcaggaatgcttctgcagcagggtgcagttaactatgaactgtttgttggaaaagagatgccacttgctgagtaccaggaatttcagaaggctcagggcaaataattatattcacaaaaggagaatgatggaatgagagcaaagaaatatttgtggtctatcctctgtgtatatttttgctatttaacacatggtatccaggctatcattttaagtcagaacaacgtaaactttgcaaaacagtggggattcaatatggcagacccacagtcagcagcatatgcagcaggtcttgcagcggtaagtacagcagttgcatggacaggctttggtaaattcgtcagcgtctggatcggcggagagatttcggatcatgtaggacgtaaaaaattaatgatcggtggagcagcattatatattctgtgcttccttggattcttatttacaaaaagtgcattagttgcttctgtatgtggatttgtttcaggagttgcaacatccggtttctgggatgcatcaggatatcctgctgtacaggaagcttatccggcagcacctggatctgcactgatcggaatcaaattttttgtttctgtttccggtatgatttatccattcctggttgttcataacgcaagcagcggaaactggaaattaaatgttattattccgcttgtgatgtcgattgtttgtcttgtacttgcaattattgcaccgtttgcttatgatgatcagaagaaagcgtcagaaggaaagaaagacaaatccgacaatgcagtgcaggcagagattgatgcagcgaaggctgcaatgcttgtaaagccaaacaagtttatcgtatttcttgtcatgttttatgcgttcctctgcatggcgatcatgtatggcgcacagcagtatacaaaagcatttggactttccgtatgtggactttccgagattcaggcagcaggtatgacttctatttatacgatcggatctatctgtgcagtacttttctgggcgttcatgatggcaaaattaaaatggaatccgctgaaggttgtacttattgattctatctgtacagcagttgcacttgcgggtgtactgtttatccatcaggtggcaatcatttacatcgctatcgcaatgttgggattcttcgcagcaggaggtgctcttcagactggtcttgcagttgttcagttatttaacccaggaccgaagggaagaaatactggtatttattacacatttatgggtgcggcaagctacctgattccagtagtggcagcacagcttacaaaatcatcaggcgaggccagtgcagtatacagcctcatgatcatgttgttagtatttgcaatccttgctattttaagttctctctacttagtagcacagcacaaaaaaatcttcgggaaaagtgcattataggaagtaacatagtaacaatctcaattcatacgaaaaaaatggactgttgttccaaaaaatgttatcatcaagaagaatgcagtccaattttttgagattaaattgttaaaaaatagacacttgtaaatcagaaaatgaaggaggagcttaaaagatgagtccgaaaggaacaagaaaagccaatgaacttccctatattccactcggcccatttcagtggcgtattccgggaattcattacaaattagaatatgtagaattttttcaaggtctgatccttggcgccactgcgttaagttcgatcccatatctgacggataatcttggacttccgtatgaactcgcatggagctgcgtcatcattgaagtatttatgtacatgcttcatggatggttaggagatccggttgtcccgggatggatcacaccgacattaccatttacactggcatatttaaatggattcccaaaaggaccggagcgtattcaggcaatgattgcattgcagctgcttgttgcatttgtatttatatttatgggaattaccaggcttgcagataaatttgtgaatggtgtgccgaattcaatcaaaggcggtattctgattgcagcaccgattacagtattgcaaggacagctctcagatggaagccagctgatgactgcgccaatcgcaacactttccggtacattgttacttgcgtttttgagtttttcaccgttttgtgaaaagaacagagaaaaatacaaaatattggatatcatggcaaaatatggaaacttattcccatatctgattgctatgttagcaggagtattgcttggagaattgtcaaaaccggttctcgaacttggaacgctcatccgaattcctgactttagtaatattttccacacagtcagtatttttgcagtcggatttccaccgatttcaaaatttataagtgcaattccgttggcattgatctgttatgtacttgcgtttggagattttgttacatcacagacgttggtagaggaagcacaggacagcagaagtgacgaatatatagactttaattcaagcagatcaaacctgattagtggtcttagaaatctgatccttgcaatttttgcaccgttcccaccgctggctggtccgctttggattggtatgactgtatctgttgcaatgcgttataaagaaggaaagaaagcaatgaaatctctgatcggtggaatgagttctttccgtatggcaacattcatcagtgttattttagtgccgatcgtgtcattcatgaaaccaatcatgggcgtgggttctgcgatcactttgttattccaggcatatgtatgtgcaagaatcggtatggattattgtaagacgagtacagataaaagtattgccggagtaatggcggcagtgcttgcatttaaaggttccggatgggctttgcttgtaggttttgcaatgaacattttactgtctaatatggaatttcagaagaagaaattggagatatcagagacagaacaaaattaataaaagaattcaacaggagcagttagtctggaaaatagattagctgctttttgtgtaaaaagcagctttaaacaaacgtaagaaccgcctctttaattttctgataatgtgattcataaatcactattttcccatgctcggttgcaatcagtccctcctcgtacagacagtctaaatgtctgtatagcgtacgaaggctgatgttaagcagctgagccaattcttcttttgttgttttgacgatgacaggaaatttctgattttcacaacatcgaaatagatgaagcaataacctgtcttttgtattatttaaaagcaaatattcattttcattcaaaatacgttcaactaataaggacaaatgcttaaggctgagcactccgaattcaggatctcttgaaagttgatccagatatgtttgtatcggaatgcgaatataggaacaatcagaagcacagcgaatcgttgctgtgtgtctgtttaatgtaggatgtacagcttcaaataagccgtagatttctataggtttgcaggctacggtagtcaataattttttttagatctccggacattttttgttcctttcttctataaatatgccaaatggcatttttttaaattccatcctaatgatatcataaaggccataagaggacaataaatttcaaccggtgtttcagtattaaattatttgtgaggtattgccatgttaaacattactaatttaagggagacattgtactttgcaaccgacagatgtaaaatctatttgtcctcactttcgaggacagacggattttttcttttttgttataataaaataaaagaaaagaacacatcggatatgtcgcaaaaggaaagggggatggtttgatgcggaaaattgtggtcgatatgcagaattttctgtttgctgattccatagcgaccgcattcagaaattcagattatgagatcgatgtgattcgtacggagtctccgaaggatacggttgaattgtgtcaggtgtacaaaccatttgttcttataatggaagtgacaggttatatcccgtggaacctctgtgagagattgaagcttcgtgatgaagtaaagaaaatgtgtccccactgtaaaattgctctcattgtagattccaatacggaacgacaggcagcgatagagattcgggatgcaaagaagaatggttttattgatcagtttttctatggatctatgacagctgaatatctgatggatcagatttatgcgatgtaaaaaggcagcaggaaacaaaccgtgatttgtctgtagaattttaaaatgtagacagatcataagttgaaaaaggaggagtcagtatgggacttattaaagcaggtatgggtgcaattggtggaacattagcggatcaatggaaggagtttttctattgcgaatctatgccgaaagaagtgcttgttacaaagggacagaagagaacgacaggtcgttcttctaatacaaaaggaaatgacaatatcatttctaacggttccggtattgccgtggctgatggacagtgtatgatcattgtagaacaggggaaggttgtagaagtttgtgcagagcctggtgaatttacatatgatacctcaacagaaccatctattttttcgggcaatctcggtgagagcattaaagagacatttaaaaccgtaggcaagcgttttacttatggtggagatactggtaaggatcagagaatttattactttaatacaaaggaaattctggaaaaccgtttcggtacagcgaatccggttccgttccgtgtagtagactccaagatcggattggatattgacgtatcaatccgttgttcaggtgtatattcttataagattgttgatccactgttgttctactcaaatgtatgtggaaatgtagaacaggagtattcccgtgaagaacttgacagtactcttaagacagaatttatctcagccctgcagccggcatttggtcgtctgtcagagatggaacttcgtccaaaccagattgtaacacacaacacagatcttgaaaatgccatgaacactgcactttcagagaagtggggcgctcttcgtggactgaaggttgtcagtattgctcttggatcagttactcttccggacgaggatgcagaactgatcaaacaggcacagcgtacagcaatcatgcgtgatcctacaatggcagcagctacacttgtcggtgctcaggcagatgcgatgaagaccgcagcaggcaacgaggcaggagctatgacaggattcatgggcatgggtatggcaatgaacgctgcaggtggtggaatgaatgcacagaatcttttcgctatgggacagcaacagcaggctcagcaggcagcacagcagcaggcagctccgacaccacagccgacaccggcaccgcaggcagctccggcagcaggcggatggaaatgtgcatgtggtactacagtaacaggtaatttctgtccgaactgtggaacaaagagaccggcagaggacgaaggctggacgtgttcctgtggcgcagtaaacaaaggcaaattctgtacgaactgtggagcaaagaagccggcaggagcgccgctttaccgttgtgataagtgcggatgggaaccggaagatccgaagaatccgccgagattctgtccggagtgtggagatatctttgacgagaacgacagacagtaacggatgaatagcagttagaaaataactgccggaagcacggcacggaagaaaggagaatgagttatggcaggcttgcaggaatataaatgtccttgctgtggcggtgcaatcgcctttgacagtaagattcagaagatgaagtgtccgtactgtgatactgagttcgagatggatgcactcaaaggttatgatgcagagctgcagaatgaacagacagatgacatggagtgggatacttccgcaggcagtgaatggcaggaaggtgaaacagatggtttacgcacgtatgtgtgtaagtcctgtggaggcgagattgtcggagatgccaacatggcagcaacatcctgcccattctgtgataatccgatcgtaatgatgggacaatttgcgggagcattaaaaccggatctggtgatcccgttcaaattagataaaaaggcagcaaaagaaagattgaagaagcatctgaccggaaaacgtcttctgccaaagatcttcaaggatcagaatcatattgatgagatcaaaggtatttacgttccattctggctttttgatacaaatgtagatgccgcagtccgctatcgggcaacaaaggtacgcatgtggagtgacagtgattatgattatactgagacaagtcattttatggttcaccggggtggaagtattggttttgaaaatgttccggtagatggctccacaaagatggcagatgatctgatggaatctatcgagccattcaatatttcaggtgcggtggatttccagactgcttatctcgcaggatatctggcagataagtatgacgtaactgctgaacaaagtattgaacgtgctaataaacgtgtaaaacattctacagaggaagcttttgctgagacagtaaaaggtggttatgctacagtaacaacagacaatagcagtgtacaatttcatggcggaaaagcaaagtatgcactgtatccggtatggcttctgaatacgacatggaacggaaataaatacacctttgcaatgaatggacagacaggaaagtttgtcggcgatctgccggtagataaaggtgcagcagcacgctggacagtgatgctggcagctatattctcagttgtaacgtatggtgctgcatggcttttgcacctgatcggactgttttagggaggtggggaaatgaagaaaagaattttatcgtttatgacgatcctcatcctctgtctaggtcttgcagttccggcttttgcggaggaaacagaaggatttgcgaatgaatatcctcgtgtcatcgacaatgcggagctcctgtctgcagatgagagggagctgttaaccagtaagttagatgagatcagtacgcgacagaaggtagatgtgacggttgccacaaccgatacactggatggactgacggtatctgattatgcggaacgattctacgagtctcataattatggttatggaccggacaaggatggaacaatacttctgatcagcatggaagatcatgattggtatatggcaacctacggatatgctattacagcatttacggatgcaggtatccagtacataggagaagagatgacgggtgatttgtctgatggtgattttgcggcagcatttgatacatttgctgacgagtgtgatgattttattacgcaggcaaaaaccggagaaccttatgatatcgataatgaaccacaaaaaccaatgtcatggatctggattccgatttcattagtagctggtatcgtcctttcattgattgttgttggcactatgaaatcaaagttgaaaacagtacgtttccaggcagcagctaataattatgtgaaagctggaagtatgaatcttactgagagcagagacatattcctgtataatacaatgacaaaaacaaaaaaagagaaaaatgattcttccagtggtggcggcggaagcagtacgcatacaacatcttccggaagcactgccggaggcggtggcggaaaattctaggagagatgtccggatacagaataccggggcaatttaatagtgaaaaaagagaagctggttcccaaatgcttgggaattggcttctcttttttaatgatgtaattatcttttcacatccacaaaatgtttcctgaactcatcataaggacacgaccgtccccagtagaatccctgacagtaatccggcctgttttaattctttcaggaagttttgcgccttttcatttttttcgagcagaatactttctgtcagttcgattgcaattgcagcaggtggaagaccagaagcgtccatctcgctgataaggtctgtaataatatctgattttgtgatctgcacctgggatacattaatattaactttgaaatcaggaatttgcatccggattttccggcaggcggttattgcttctcgcatgaaccagcgtccggttggaataatcagtccgcttgtctctaaaagtggtatgaactcagcaggtgagatcggtccaaattttttagaagcaaagcgtatcagcacctctgctccggtcagtttatcctgtcggatatccatgactggctggaagattattgagaatccacggaaaccatgatttactgctgaatgaagctcatttgtgatctcgcggatacgtaagaaattttggtactcttcttcctggaatatataatagcagtttcttccatgctgcttagccatggtcagtgaaaagtcagttcgctttataatctctgcataaccggtccgtgatagatccggaagcggcaggataccggcagaaatagtaaatactgcagcaaagttgttttcttcaataaactgattaatatgtttgcatatgcaagtttccgtttttgttttatgcggtacagcatgagatcacttcgttctgaaaagacagtgccaaacaggatgaacaggattaaagaaatccataatttttcttaaatttcataactttttccttttatagaatatcacttccatccgggatcttggaaataatcgttcgattagtcctgaacagaaagataagtgagacaatcagtgacatgacttccgcagtcaggaaagcccaccatactgcatgaagcccaccaaattttgccagtacatatgcagccggaatcagtactacaagctgacgcatgatggatacgatcatactgaacacggcctttccaagcgcctggaatacagtaccacagatgatgccaaaccatgcaagtaagtaatggataccgatgatacgaagcgcagggacgccgattgtaagcatatcagcagatgcgttgaacattccaagaagtacctgtggaactaattcaaagcaaaggaatccgaagagcataatgcaaaatgctgttgccatactgagtttgatcgtcttgaccatacgttttctgttctgcgcaccgtagttgaatgcaatgatcggagtgataccgttattcaaaccgaagacaggcatgaagaaaaagctctgcagtttgaaatacactccgaatacggcggtcgcagtagatgaaaatgtgatcaggatacggttcatggagtatgtcataacagaaccaatcgactgcatgataatagatggaataccgattgcataaattgttctgataattcttccgtccggacgaaaaccatggaactgaagccttacatccgggttgaatttatgattacatgtaaatgaaacaagtgctccgacacactgtccgatgaccgtagccacggcagcacctgtaacccccatcttcgggaaaccgatcagaccaaagatcaggatcgggtcaagaatgatattcgtaaccgcaccgcataactgagaagtcatactgaaaatggttcttcctgtggaagtgagcagtcgttcaaagcaaatctgtgccagcagtcccatagagaagatcataacagtgctcagataatcaattcccatttccatgatctcaacatctgcatttccaatctggcttgcatagaaaggttttacaactgtaaagccaaggataagaaatacaatataacttatgatataaagaaatgttccgttagacgcaatcttatttgcttcgtcagtttttttgctccgagtgctctggaaagaagtgcattcataccaacgccggtaccggttgcaactgcaacgagcagcatctgtaacgggaaggcaagagaaactgcggtaagagcattttctgacagttttgctacaaagatactgtctacaatattataaagtgcctgcactagcatggaaaccatcatcggtaaggacatgttgaacaagagtctgccaatcggcatggttcccattttgttttctgctgcaggggcagaagctgttttttggttcatatattctcctgttattactaaaaattcatttaaagtgccaattattaataatagcattatatggtgtacgtttcaatagttgaagacttgaaaatgtcttaaaggtcagtttggcattcttgaattattgtgttaataggtaaagtcagtagaagtaatagtaacaacttgacagtttgcgtactgtatgatattttctaagtagtaagtagtaagtagtaagtaaaaataaaaatggcgatcaggaaataagaggaaagagaggaagacaggtatgaaagatcttacattatctcagcaatatgcattacttgcgttggacggacaggagagtattcatccaagcgtggcaaaaagtgctgtattgagagctgtttctgctgcgcgggtgttggagacaggattaggaaaagcagatgcggattcattttcagaattttctgaagaactgcagaaagcggtacagatggcaaaaacattaaagaaaaaagaggagactcagattgagaaagaagtggctgctgttttggaagcagaagaacttctaaaggaagtaccagatattttgggctgtgatatgaattatgatacatcaggtgttgaactaaaggcataccttagtgatgaggcaagttatatcagaataaaagaaggacttcgtgcagagattctagaggatggtccaattagtctggaagatgcggttctcttatggcttctccgtgaaagtggctgtatccatgacttattttctgtatcagagcagaaccgtgtagaagagcgtatgacagaagctgccgttcaggatgagaagtaccgtgcattatgggaagcagaatttcataatgtttttgaaggatttatgaatcggtttgtgaagactaagagcaaactgcttaagaatccatatttagagggtgttaatcttgtattcccgtatcttgacagaagaaaatctgtatttattgatatggttatttttggaactaatgtggcagacagaagagctgcggctgtagaatatctgaagaaaaaaggctttgcggtagaggagatcagagtaggcagtgagactttactaaaaataggcaatatatattaccgtatcttcccaatgacgaaaacagcatataaagtaccgattcagggagtcaacctggtaccggcatactggcagtaggaagaaagtactgaaatactaattatgtagacagtagaaaaggtgagcagatgtcaagacagagaagcatggaagtaatagagcaggcagaatatgtgacaatcggagagcttgtgcggcttacggcagtgcgttacagtactttgaaattttatacagaggaaggaatgctgccgttcgagcaggcagaagagaatctgaccagaagataccgcagagttgagagcttagaaaggattgcgcagattcgtcggttaagagaacagaagaagacaattccggagattaaagagattctgggatgtggtgaactgtaaaatatgaatattatctagaaaaaatacgaatctccagaagaagttcaagtataaaaatactgatttctactggagattcgtattttaagaatatgtgttaatattggaaaattatgcatccagtatgctttctgcaacttctggaagaattttactgactgctccatggtaagctgcggttgctttttcatccagataatgtgcttccttgtggattacgatcaaatctttgcctgtgaaatgtggaagcatatctttgcacagactggaattcaggttcattccgagaacgagaatcgtatcagctttagcaacttcttccacagcatggctaatgacagtattactgagcatttcaccatgtaaataaactccaggatgaatcacagttgatttacacacatcacaaagaggaactttatcactgtttttgatatattcaatcggaaaaatctttccgcaacgtggacacgcattattttcataaatatttccatacatattgatcacatttttgcagccggctttctgaggcatattatagatgccttttgtaatgattgtctttaaatatcctgcctcttctaatcttgcaagtgcttcatttccctttcctgcctccagatgtttggaaagaatttcatttctataatattcatagaataattctgcatgtgtgttaaacatacgggcactgaataattcttccggagagtagccatacttttcttcaatccgataggattcgtcgctgtctcgatgatatgcgacattttgctctctcataaattccattccggcgagacaaacaagatatttagatgttctaattgtttcttcaagatagtttaaattcataatcatccctgcctttacaaaatgctgctgttaacgagttactataatgctagtatagcataaataaaaagaattgtctgaaaattcaaataaaaacaggataaaatttaaagaaaaactggacaaaataaaatttacagttgacaatagcgggagaataggctatattaaaaatataataatagtaattattattaaaataaaaaggaggttatcacatggagaaaaaagcactttataatttgtcttatggagtatttatgttatctacacgttccggtgagaaagtaaatggctgtattaccaatacatgtatgcaggtagcgaatgacccagttcgaattgcgatctctgttttgaacagtaattatacctgtgatctgatcaaagaaagcggaatttttgcactgagtctgttggatgtagaatgttcctttgagacaattaagcatttcggattccagtcaggaagagatgtggataagatgaaagatcttacgttaccggtggatcagaataatattccgtatatgggatatcaggcatgcgccgtgatcagtggtaaggttctggaacagcaggatctcggtacacacactctgttcattgcagaagtaacagatgcaaaactgctgaatgagaatgcaccgcttacttacgccgactatcagaatcgcgtaaaaccaaagaagaaagagatacctcaggataagaagatcgttggatggagatgtaagatctgtaattatgtatatgaaggcagtgaacttccggcagattatatctgtccaatttgcggacatgatgtcagcgattttgaaccgatttttgaaaattagtggtaatgattcattgatcttgttgtgtagtgaatggatgcaaggtcaggaataattataaaaatgaagatgaaaagaaaaggagatatgaaattatgaaaaaatatgtatgcgatttatgtggatgggaatatgatgaagagcagggatacccggaaggcggtatcgcacctggaacaaaatgggaagatgtaccggaagattttgaatgtcctctgtgttctgctggaaaggatcagttctctgaggagtaaatagaacagttacgaaaatttattttaaataatgaaaacaggtggtagaatagacagagaactattttatcacctgttttacgttacgaaagagaggaagagaaacatgtatcaggcagcaaatgacagatatgagaaaatggcttatgtacgttgtggaaagagcggattaaagctcccggcaatttcacttggattgtggcacaactttggagataccggtgtttatgagaatatgaaggaaatccttttcacagcgtttgataatggaatcgtacactttgatctggcaaataattacggacctgcttatggaagtgcggagaagaattttggtaagattctgaaagaagaacttggcgtgtacagagatgagcttctgatcagcacaaaggccggttttgatatgtgggaaggcccttatggaaactggggaagcagaaaatatcttctttccagtctggatcagagcctgaagcgtatggggctggattatgtagatatcttctaccatcaccggatggatccggagactccgttggaagagacgatgggagcacttgcaagtgcagtgcagtcaggaaaagcactttatgtgggactttcaaattatgatggtccaacattggaaaaggcagaagcaatcttaagagatttgaagtgtccatttgtgatcaatcagaacagatattctatctttgacagaacaattgagaaaaatggattgaaagacaccgcgaagaagctggagaagggaattattgcattcagtccgctggcgcagggacttcttaccgaccgttatctgaaaggaatcccggaagacagcagaattatgacggacggacgtttcctgaagaaatctgctctgacagaagaaaaacttgtgaaaatcagagaactgaacggactggcagccggaagaggtcagacattggcagagatggcattgagttggattttgaaggatggtattgtaacaagcgttcttgtaggcgcatcaaaaccggaacaggtattggataatatcaaggcaatacagaatacagaatttacagaagaagaactccgcaagattgatgagctgtcgctcgtttaagctagttgtcacagttaatctgtgttatactggttaaaaatgaaaagttgaaaaaggagaatttaccatggatagaattgcaagctttacaatcaaccacctggatctgatgccgggattgtatgtctcaagaagagacgcaaaaggagattgtgtcacaacaacatttgatctgagaatcacagcaccgaacagagagccggttgtggatactccggcacttcatacgattgagcatctggcggcaacttatcttcgtaacagtgagaagaaggatgacgtgatctactttggaccaatgggctgcagaacaggatgttatcttgtaatgttcggtaatctggattcagaggatgttcttgatctggttcttgagatgtgtgatttcattatcggatttgaaggagagattcctggagcagcaccggagcagtgtggcaactatcaggagcagaaccttgatatggcgaagtattatattaagaaatacaaagatgcattggtgaatgaccgtcatcttgtatatccggaataatgaaaagtgggaattgtctgacgagttgttttcagataattcccacttcgattatacagatctgatttttaacataatatagcatgtcactgagaggaattgcaaaaatgcaaatttagttcttaagcaattccgcattcttatgaattgtctcattaacaatattctctacataacttccgatatgttttttgacatccttatccagttcatttggatagatcggagtaccgtattcgagaacaacatgtgttttcttgatctttggaaaatgattttcgaaaatttcagcagtattattcatagaaatcggtacgatcggacagccggtctttgtggcaatcttgaaagcaccttctttgaaaggaagaagacttaattcttcacctttatttcttgtaccttcagggaagatacagatagagataccgttctttacataatcgattgcctgcaggattgtctttaaaccttccttcggattctcacgatcaaggaaaagacaatagacaaaacgcatccaggtagaaagaagcggaactttttccatctctttctttgccacataacctgtaagattcctgcatctgctgtaagtgagcagaatgtcaaagaagctgcggtggtttccgataaagagaacaggttcatccggtacattctcttcaccaatcacggtaactttcacaccggtcattttcaaaatcactttaaatccccactggacaatacgcagagaactgatgtcacgcgcatgtgggttgaatttaccgatcagccattccacaaagaaaacaggaatagaaagaatcaggtaaagaattagaaaaattgcaacaaaaataaatcgaaacatataatatcctttcttttgtcttatgaataatagagtcgccataatataaaataactactggcgcatgtagccttattataccgtagcagcataaaaaatacaactgatgcatagattgaagggaaataaaaaatccggatggcgttactgtttacagtatctgaaatattgtaatgaaaaataaaaaacaaaagggcattttaactgtgtttctactgtgtgtctgtttttttataagcggatgtattaccaggattgagaaagagcaaaaacaaaaagatctggaatatattctgatcgaccaggagcatcttccggaggagatgacagaagtgatcggtcagttaaaaaagaaagcatttcattttgtctactcggatcagggaaagacatatcttgcagaaggatacggtgcatgtccgacaacaggatatacgattgaggtggaaggaactttatgaaacggacatgcagtttgtttgcatacaagtctgatgggaccggcaactggtgaagagacgaaagaaatcacgacatttccatacatagtcgtggaaatcagtggaacagaaaaagaggttatgtttgattgaggaggagcaggatggaaattgtgaagagagcgatacgtctgatgcatgagggaaaatgtatttacgatcagtttcagctggacgaagattataacgttccggatgcaaaggaggatgtgggaaatgtaattgaagggatagtctgcgtgaagacggaagatatgaagcttgtggaaaattatctgaaaatcagtggaaaagctcaatttaagattttgtacatgacagcctctttggatccgcaaccggcagttttagaaggaaagcttccattcgaagagatggtatatgtagaacaaccgggagaggaagaatatttcctgaaaaatctcagaacagagttcagtgtatcaatggtgcattccagaaagctgagtctgcatctgctgacagagcttgaaattggaagaacccagatgataagtgaagaagtcacggaagatgtggaaagtgagcatgcagtttataaaaaaatgaaaaagtttcgtctgcttggattgtcagacacaaaaaaagacacttatagaataaaagaagagattacattaccgggaacgaaggagagtatcagccagattctgttatccgaagtgcacggtagaaagttagaattacgcccggggacagatgaggtgacagtcagaggagaactgcaggtgttctgtctctatctgtcagaagaattgaaggcagactgggtcagccaggtgattccatatgaaggaaaacttctttgcaatggcttgacagaaggaatgttctattctgtggaacatacgctggaggatacactggttgatatccgcatggatgaggacggcgagatgcgggtccttgggattgaagggacattactgctgcggatgaacttttacgaagagcaggagatggagttgttagaagatatttactctttgcaagagcagtgtattccggaaaaacaggagacggtttttgaagagcttttaatgcagaaccaatccagatataaactaacggaacggctttcacttccggaattaaaagatgatgtacttcaagtactctgcagcagaggggaaatccagatagagcatacggagtatagagaagaaggaatccaaatagaaggaatcctgcatcttagctttctctacctgagaggagatgatgcaagaccatatggaagctggcaggggatgataccattccaacatctgatcgaatgttccgatcttccggaaaatgtacgttgtacgatgagtcaccatgtagatcagatccaggtgtctatggcaggcagtgaggctgtagaagtgagagcaattcttgcatttgatgcattcttacggcgggaggtagaacttcagacaatcgtatctgtcctggagaaaccgctggatcttgaacagatggataagaggccgggaatcgttggtcatattgtgcaggagaaagaagatctctgggagttggcaaaacagtatatgactacagttgaggggattatgaatgtaaacgaattggaaaatgaaaatgtgaaaataggggataaattgttgatttttaaagaaaatatgagtatactgtaagtactatgtatacaagatacatttgtgtaaattttcacatctagttctttggaaaacagcgatggaggcacataggatgaatcaaattgaattaaaagcacttgccaagattaatttaggcctggatgtgcttggaagacgcgagaatggataccatgatgtcagaatggtcatgcagtctatttatctgtatgatgaagtgaagattgcgaagaagaaagaacctggaattacactgacaacaaatctgaagtttcttccaaccggggatggcaatatcgcttataaagcagcgcagcttctgatggatgaatttgatctgaaagaaggggttcagatcacactgaataagcacattccggtagctgctggtcttgcaggaggaagctcaaatgcggcagccgttctgtttggaatgaaccggttgtttgggctgcacctgacgcagcagcagttgatggaacgtggagtgaagcttggagcagatgttccatattgtattatgcgcggaactgttctggcagaaggaatcggagaagagttaagcgttcttccggcaatgccgaaatgtacggtactgatcgccaagcctccgatcagtgtttcaacgaagatggtgtatgaagcactggactccaaagagattgtcgagcatccggatattgacggaattctggaaggacttcggaagggagatcttcacaaggttgcagattctatggggaatgtgttagaggatgtgacaataccgatgcatccggtgatcgcggatatcaagcaggtgatgcaggattgcggagcaatcggggcaatgatgagcgggagtggaccaacagtgtttggtctgtttgaaaaccgggcatcagcaagagaagcacagaagatgattcgggacaaaggtctgacaagacaggcatacgtaacgaatatacacaacgttaggaggaagtaaaatgggaactgattttgaagtaacaatgaatgaatatctgcctctgagagatgtggtatttaatacattgagacaggcgattctgcgcggagaactgaaaccgggagagcgcctgatggagattcagctggcgaataaactcggagtgagcagaaccccgatccgtgaagcaatccgtaaactggagctggaaggacttgtcctcatgatcccgagaaaaggtgccgaggttgcagaaatcacagagaagaatctaagagatgtgctggaagtgcgctgtgcattagaagagcttgcagtacagcttgcatgtgacagaatggatgaagaaggagtgcgcgagcttcgtgcagcagcggaaacgtttgagtctattctcaacagtgatgatattacacagatcgcacaggcagacgttgcatttcatgatattatctacgctgcaacagataaccgcagactgatccagcttctgaataatctgcgcgaacagatgtacagatacagaattgaatatctgaagaagaaagaatgctacccacagctgttgaatgagcatcagacaattattgatgcgattgccggacatgataaagagctggctacaaagtttacaagccaacatattaagaaccaggcagaaacggttgttggcactatccgtgagaaagaagaaaatgcttaaaaaataaagaatgtgtctcggcatattctttattctatatgtatggaattcatttttgtggaaagactccatgtatgaacaaaattaatttatcatagatggaggatgatattatgaagaaacggtttgcactgctcagaagaaagctgaagtctgtccgagaagaaaaactgccgggaagagcagtgattttttcagtggcagcggggcttctgatcgctgctttcttcacaggaatgatatatacaaaacaggaattatatgcacaggaagaaacgcagaagcatctggcgcaggaagtgtttcgctttcatgtgttagcgaatagtgacagcgaaaaggaccagaatctgaaattgcaggtaagagatgcagtattggattatatgaaagaagaattgtcagaagaaccggaagagaaacagtgtcttaagcagacagtgcagtgggcacgtacacatacagatgagatccgtgcaatcggagaaaagacagttgcggcggcaggagaagatcagagtgtgaatgtggctgtgacaacctgttactttcctgacaggacttacggtgatgtgacatttcctgcgggaaattatcaggcactgcgggtagaactgggaagtgcagagggacataactggtggtgcgtgctttatccgaatctctgctttctggatacaacgaatgcggtggttcctgacaaaggaaagaagcaattaaaacaggtactgacggaagaagaatattccaaagtgacagcgaatacaaagtttaagattggctggtatttttggaaataagaaataaaagaggttaagaaaatgtatgaatttgacagcagagtacgttacagcgaggtagatcatcacggtacgatgaccgttccggcgttgatcaattattttcaggactgtagtaccttccagtcggaggatcttggaattggtacaacggttctgaaggaagagaaaagagcgtggcttttatcttactggcaggtgatcctgaatcggaaaccggagcttggtgagaagatcacaatcggaacatttgcaacagaattcaagggattgtttggaaacaggaacttttatatgaaagatgcagatggaaaatatctcgcctgtgctaattcagtctgggcatttattgatacagagacaggaagaccaaccaggccgcagccaaaggatgttcagttgtatggagtagaagaaccacttgatataccatatgagggaagaaaaatccgacttccggaagagacagatgatctggaagcatttccggtcagaaagtatcatattgacacaaatgagcatgtgaacaactgtcagtatgtgcagatggcattggaatttcttccggatgatcttcagatcgcacagctgcgtgtagagtataaaaaggcagctgtactgggagatatgatctatccgaagctgagtaaagaagcagacaggattgttgtggaactctgtgacgaacaggcaaaaccatatgcagttctggaatttaaagaagaaatataaaagaagagatagaatagaaaaactcccggatgttcatacagaaatttctgtgaacattcgggagttttttgttgcgaacaagtaacgttcgcaggtgatatttacttatcaagacttgccaggacatcttccagaacatcctcaacagaatcagttacttcatccgcatagtaggatacaccaggtgcactgtttgacattgcgtagctgtgaccgaccagctcaagcatttccaaatcattctgctgatctccgaatgccatacattcttttggttttacatggaataatttcattaggttagaaagagcagcacctttatttgttcccggagcaatgaagtcaatccagatatttccagaagtaacgaccttgatctctgcaccgaacatttcctgtaagtgttctaaatattgcatgattacttttgtgtcatcaatcatattacagattgcgatcttgagaaacggaccttcgattttacttaggtcatctacgatttttgttgtgttctgcatgacatttacaatatgatttacaaaagcttcatgatgatcttcgatcagacaggcatcttctctggaaatgagaatatcaaaattcggtgattttttcacttcatctataatgcggcaggcaaggtcatctgcaattattccgcgagagatcacctttccctgatgaatacagatagaaccattttctccaatataggaaatctcgtccttaatctcagaaaacagtctgcgctcattatcatactggcgtccgcttgcagcaacaaagtgaacgcctttttgtgtcagttcatgaatcagttctatggcacgaggagtcagtttctgtgctccgttatgaagaagcgtaccatcaaggtcgcttgcgattaatttgatcatatgtaaaatcctcctgattattctgcaataacttcttcagcacgtttcagtgcggcactgatattcggctggaagttttcttttccaaccagttctgtgaatccggctttctccataactttcattggctgttcgttgacgtgggaaaagacaaccgtaattccctttgactcacagacttctaccagatcaaccaaagcattcatagcagtactgtccagtgcaggaacgcttcgcatacgaagaacgaggcaggtagtaaaatcttttacgacaatgtgttcgatcgcacttgctgctccgaagaacagaggtcctgagatctcatagacacggatctgaagtggaagtttctgaaggtgttcatcgacatccggggtgtcatcatccacataagtccagctgttgacgtgtgtctcttcgctcatacgcttgataaagagcaggcaggcaagaaccataccaatctcgatcgctacgaccaggtcgaagagtactgtcaggataaatgaagcaaaaagtacaatgatatcactctttggagcagtcttaaccagttttacaaaggtatgccactggcacatattgtatgcaacgataaacaggattgctgcgattgttggcattggaatcattccggcatatggcatcagtacgacaagcacaatgaccagtgtaatggaatgaacgattccggcaatcggagtacgtcctccgtttttaatatttgcagcagttcttgcaatcgctcctgtcgcagggattccaccgaaaagagcagaagcaatgttgccggctccctgggctacaagttccatgtcggaacggtgtttgccgttgagcattccgtctgcgacaacacaggaaagcagagattcaatcgctgcgagaacagcaatcgtaaatgcgttcggaagagcattttgaacaacttcaagtgatacagccggaagatggaaggatggaagcgagttgctgattgtataaagatttccaattgtagaaacttttaacggcaggaactgaaccatcaggattccaatgataactgcgatcaaagatccaggaattcttttgaagatgtatggagcaatgatcagaacagcaagacttactgaaccgacaatcagtgcatcaatattaattgtagagaagttttcaacaacagcacggaatttctctgttgtttcgatcggttttaccccatccggataggtaagtccgaagaaatctttcagctgtccgattacaattgtaacagcaattccggaagtgaatccggttgtgatcgtaaatgggatgaatttgatcagacttccgaaatggcacagtcccatcagaaccagaaagataccggcgaggattgttgcaatgacaagtccatccattccgtctttggcaacaatgccggcgacgattgttgcgaatgcagccgttggtccggcaatctgtacactgcttccgccaagtgcagagatgacaaatccggcaacgatcgcagtgaagataccagcttccggtcctacaccggatgcaagtgccagtgcgattgacagcggcaatgcaataattgctacaatgattccggcagtcacgtctttgatgaactgagaacgattgtagctctttaatgatgtaagtaacatcggcttcaatgaattcatttgatagagtaatcctttcttttatgataactataaaacataacctttcaagtatagcatagaaaaagggacactgagaagaggaaaccgtgtatgtttttaaagcccaaaatgaaattttaaattccaccgtccgcttatgcggtggaatttactctaacacagtagatatttactatttcatataataatgttattgttatagctccttctgacagcagtagaaggagaattattatgagtaaatatatacctggaaatcagaaacaccttactttaaatgacagaatctatattgaaaatgaattagcaaagggaactacattcaaagacattgctgctttcctttgcaaagaccctactacgatttctaaagaagttcgttcccacagagtatccgattggtatcataaaggtactttctataacgcaaagaacttttgcattcatcgctatcattgcaagaaaacgaatgcctgtggaaagatcttactctgtggcataaagtgtacgtcttgtcctacttgcaatcaaacatgcaaagactttgaaaaagaacggtgtaaacgactagataaagctccttatgtatgcaatggatgttctaagaaaatcaatcactgtactatcgcacacaaatatcgctatgacgctcggtttgctgatcataaatatcgtgaattattaagtgattctcgtgctggaataaatatgacaaaacggcagttacatcaaaaggatcaaatcattacacctttgatcgaacaaggacaatcaccttatcaaatcctaacgaatcatccagagctggaaatgtctgttcgctccatgtacacatatatcgataagggcctgtttactgcccgaaatatcgatttaaaacgacaacctaaatttaagccacgcaagtgtcataaaacccaaatcaaagaccgtaccgtgtttattaacagaacctatgctgattttcgttctcttgacatccaggcccattcttttgttgaaatggacactgtaaaatcctcacgtgattcgcaaagaacactattaacaatgatttttacagaggaaaaattatttcttgcatttctccttaatcgttgtacaaaaggtgctgtgcgagctgtttttgatcgtttagaaaaacgtatgggaacctttgaatttatttctgttttcgaaaacatcttgactgaccggggctctgagttcagtgaccctaatgccttagaaacaggaattaacggaatagaacgaaccaatatttactattgcgatccaatgcgcagtggacaaaaaggaactcttgagcaggctcatacgctgcttagaatggttttgccaaaaggaacttcttttgaatttcttacacagtgggatgtaaatcttattgtaaatcacatcaactctacacctagagcaattttaaacggtagaactccgtataatgttgcgcttgaaacgttgggagaagatgttctcaaagcatttcagcttaagccgattacacctgacgaagtcaatctaacgcctaagctgatacgctttaaccactaatcaactaatcgaaatctgctgtcagactggatgttagcttttcacattttttaaatgaggctggtggaatttagtcttgcacacagaattccagtggcccgtttagcatgccttgaaatcaagaaaatttcgataagttacatcaattatagcagaaaacgagagaatttaattaaaaatctctcgttaattcaataaattttaaatagtagtggaatttactttttcactggaatttaatttttcaattcagctatgtttttaaagacatgaagagtaatgttaagtgtaatgttaagagaaaaaagcttgtatctgatttataaaggtaatataataggaataacttgtaaagcatgtttgatataatgaaaatgtgttttacggtagcaaatttgtgaatagatctgataacaaaagggtatcacaagaaagaaaaggaagattattatgggaaaatattttggaacagatggtttccgtggtgaggcaaatgtagttctgacagtagagcatgcatttaaggtaggacgttatcttggatggtatttcggacaggagcacaaagccagaatcgtaatcggaaaagacacaagaagaagcagctacatgtttgagtatgcacttgctgcaggactgacagcatcaggcgctgacgcttatcttcttcatgtgacaaccacaccaagtgtttcatatgtagtaagaacagaagattttgactgtggacttatgatttcagcgagccataatccatactatgataatggtatcaaggtaatcaacagcgaaggtcataagatggaggctgaggttgaggcaaagatcgaggcttatatcgatggtgagattgatgaaatcccgctggcaacaaaagagaacattggccgcacagttgactatgcagcaggaagaaaccgttatatcggtcatttgatctctctcgcaacacgttctttcaaggatatgagagtcggacttgactgtgcgaatggtagtgcgtcaagtgttgcaaagagtgtattcgatgcacttggagcaaaaacttatgtgatcaacaatgagccaaatggtgtgaatattaatacaaactgtggttctacacatatcgaggttctgcaggagtatgtaaaagagaaacatctggatgtcggatttgcttatgatggagatgctgacagatgtatcgcagtcgatgagaatggaaatgttgtagatggagaccgcattatttatgtatgtggtaaatatctcatggagcagggaaaactgaaagacaatacagttgttacaacaattatgtctaatctgggactctataaagcatgcgataagattggtatgaagtatgagcagacagcagttggtgacaagtacgtttacgagaacatgcttaagaatggatatgttcttggtggagagcagtccggacacatcatcttcagcaagcatgcacgtacaggtgatggtatcctgacatctcttatggttatggaagcgatcattgagaagaagcagacacttggaacacttgcagatgaagtgaagatcttcccacagcttctgaagaatgttcgtgtaaaggataaaaagacagcactggataacgcaacagttcaggcagcagtagagaaaacagctgaagaacttggaacagacggacgtattcttgttcgtgagagtggaacagagccggtgatccgtgttatggtagaagcagcttctgacgagatctgcgagaaatacgtagacagcgtagtgaaagtaattgaaagcgaaggactttgcgagtaaataattaagaagagagttgtcgtgtaagacagtaaaagatgccttgtgaaatatagtttttcgcgaggcatcttctttgttcaaaaaaagaagggcgtgtgaaaaaacgagagttttttcatgcgtccttttgcttatgattataataatagttatattacataaaaaagggcataattccccttcccccataagaatgctattatgaactcctatgcggtagctgcaacttttttctgtttgttgtgatatttataaagattgtgtccgatagaaacgagaaatacttcaagcaatacagattttatccctcttcggacaattcttttgtaccaccggtcgtttttcatgataccaaaggtaccttctgcctgaatggatctgttcatccttagaagcgctccctggatactttcgagattttctatcacttcctgatgcatcgctgtaagttcgcggttgatccgaacagtacggtttttgtctgtctttttacattgttctgcgtatggacagccggagcagtcttcacactgatacacttcttcctgtcgcccatacttgttcccttttacgttttttcgatactgaagataaaagtttttcccgtttgggcaacgcatgattccgtcttccccgattggaaaatttactgcacgaaatggatcttcatggtatttcttgtccgtagtttctttcttgaacatgggaaacttcatatatttttccattccttgctgctcacagaagatgtaattgttgtaagaaccatagccggcatctgctactgggtacttcggatagaagccatatgtagtataaaacttgttcattaatggaataaaacaacccatatctgaacgatactgatttacatcaacaacagcaatgtattcatctgcaacaccgacctgtacattataagctggaagcaactggtcatttcccatgtagtctgtcttgattcacataaaagtggccgaatgatctgtttttgagtagctgttgcgatcttctccacagattttgattttttccacgtattcttccaacttagcagcataccctttgagtttctcataatgacgttgctgtgtagttttgcgatgtcccctgccatgaacaaatattgcttcattaatctgccagacttctgcatactgttcagcagcttccttccagatactctggtgcgtattcactattgatacaaagtttcatacctgtacatgaaagttcctcattgatttcctcaaagagtgtagtgatcttaccaaagagacggtatctggatttttcggttgcttttttccatacccaggagtatttattcgcatttgcttcaaacttggatccatcaatgtatagatgttgaagatccacatgttctgtcttgaagatttttttgtttatgtcttgaaatatttcttcaatggaatcagcaagaacttcgttgatgaagtagccgaaagtgcggtaagaaggtgcttgatgatccataagatacatgaagcggagattcactttacactgatcctccagttcacgcaatgatatatagccattcgccataaatccaaacaaaactgttttcagcatgctgaccgggtcatacctgagtcttcctgtattatgttgaggaatatttttcagatatttctccagttcgatttctcccataaatctatcaaaagtcagcactggatcacagatgtccaaataatcttgaattagcattggcaaaactgcctgttttgggttagaatagattatgttattaattttcattgcaagttaattataacagaaagaaagaccttgagttcattataaactcttggtctttctttttggggggactattcttttttcacagccccttttttagttgccaagcatatgagaaaacagtccactggcctgtttttgagtgtttgagtcaaaaaatgttaacactaagaaaataaagtgtcactttgtgttaaaattttgataaaagcttcttttagtgtcgggaatcttttgaagaaaagacatagagagattcccagaatataattgtgccataaggtgagcaggaggaggtgttgatatggcacacaggagttcaaaagaacaggtttacgaatatctggagcagatcacaaaggaatttgactttgaacatcttacgcgttatacaacattggacatctgtaataaattgaatatgtcgcgttctcttgtttccttatatttaaatgagctggtaaaggaagataccgtaatcaagataagctccagacccgtatattacttgaaccgtgcaggattggaacgtaagttccatatgcagcttgcccagaatgagtatctgggtatccaggaactttcgggtgagattaagagtaatattccagaagagaaggactttgaaagagcgatcggccatgaaggcagcctaaattactgtatctcgcagataaagtccgcgcttgtatatccaggaggtcttccaatcttattaaaaggtgagccgggaagtggaaagacttatctgatgagattgatccaggaatattgtgtgaataacagattgttaagtgattctagaaaaagtcggagaataaagctgaatcagatcagtgatggagaacaatatgagaagctagagcagctattatcagaactggaagacggcattctgtatctggaggatatatctgcatgtaatgccagagtccaggaacgtctggcagagtatattgccaacggggcaaagaagaaggggcggagcgtaaaaaaagaaaatgtccgtctggtcatgagtgccgacgagaagatgttctcacagatttccagaaaattactggtgaatgtacctgtgatctgtgaaatcccttcgtggattgagagaaatgaagatgagaggaaagcatttgtcgtgaagttctttaaggaggaacaggaacaactcggcagaaccttatatctttcagaaaaattgatacacaagcttatgaattatcagtttgaacataatattgccgaacttaagcagtgtgttactatggtctgcgcaaatgcatacgcgcaggattcatcagaagaatcgttggaaatctatctttacaatctgccggcaaagctgcaaggaagcataagtatgaaagaacaggatgccactctggtcagattagatgtgatccagtcagatcctgcggcagataagatactggagctgtggaagaatcttctggataactatagatattctgccggcgcaggggaaagctttgcgacatttttggaactagggaaaaagacactaaagtattattatgatatattgatctttcaggaattattttttgatgagagactaaggcctttggagaagatcgtcgttgaaatgatcgcaagtattagaagctcctacaatgttaatttcccagtaaattgtgcttatgtaatcgcaagaatgatggttgcacagcagaatcataattcaaggatacagatctgggagagggagcaccgcgaggagatccagaagatttataatctgttggtcgataatatgccgaatattaattgtcttacagagcttctcgataaacagattcagtctaatacaaacatacagctttcttatatgaacagagtgtttatcatgatgaacatttattcttataatcacaaattgaagctgatagatacagcaggtgttgtgctgtgccatggttataggaccgcaagttctattgtagatacagttaatacgatcttacaagtacaggtatttgaagcgatcgatatgccgcttgacagttccatccatgatgtcatccagaaattatctgtgttcattgaaaaaaatagttattttaaaaatatgatcctgatggtagatacagggtcattggaaggcttgggagagattattgacggttctatgaatcttggaatcatcaataatgtttccacgatcctggcattgcatataggtgaaaagatgctggcaggagagaagatgcgggatatcctggagacggtatgcagggagaatcaatgcaggtatagtatcatcagccgcacaaagagagagaaggcaattgtattcgcaagtgacgcgggaagaaatattgcagagaagctgacccggctgtttaaggacagtcttcctaagccgataccgcttgagatgatagcatatgattatgacgcgttattcaaaaatggcagcaaggatgtcatttttgaaaaatacgatgtactgcttctggttaagacgctgagtcttaggattccaggtgtcaagtcggttacactggaagagatcatgaattttaacaacattaatgtagtggatgaggttctgtcttattatctggaggaaggagagatcgagtactttaatcagaagctgctgaaaaacttttcactgcagtcagttcttgagaatctaacgatcttaaatgctcagaagctattagattatgtaagtgatgcaacaacccttctgcagcagatgctgaagagaagattcctgagcaagacagtgatagggatcaatatgcacatctgctttctgatcgaacgccttgttacaaaaacgccgattgagaattatgagaatctggatgcgtttgaggcagaacagcaagaatttatcaatatcgtaaatgaaagtttccacacactggtaagccactataatgtagaactgccggtcagtgagatcgcgtatctgcatgaatacatcaagaatgatgtaaaagtggagggaaacgagaatcaattttgattacaactttatctgggcaaagtaaggccgagatcatgaagactttgtcagataaagatgtaaatataggaaaggagcttttatgcaaagactagtattagcatcccatggttatcttgccgagggaatgaagaatagtgcacagatcatcgtggggaagtccgcgaagatatatactatatgtgcatatgtcaaggaaggaataacactagaaagccagattaacgaactattcgacagtttcccggaggatgatgagatgatagtagttacagatatatttggcggaagtgtgaataacgagtttatgcagcgattacagaatagaagattctggcttgtctcagggatgaatctgccgttagtgatccaattggcaatggcagaagatggcggctgtatatccgaaagtattaaagaagcgctggagactggaagagagatgatctgtttctgtaatcctatggtagaagttgcttctaaagaacaggaggagttttgatacaaatatgaatagggatcaattatacgcgatgaatatccattatcgctattatgatctggaatatttcttccgggcttgtcagaagatgaaccttaagcatgcagaattgtggctctgtccacagcatttttacataaatagcatgtggtctgagagccctgagaaattgaaaggtctgatgaagcggtctggcgtacagatatcttgtatctgtccagaacagaataatccgaaaccgaataatatagctgcaagatctgagcttttgatcgagaatacaagaaaatattttcagaatgtgatcatacttgcctcagagttgggctgtgacaagatacttgtaacaccggggtggaactaccatgatgaagaagtagatgaagcaaggaaaagatcaatcagaatgctgcagagcttatgtgatatcgcagatccatatggaataagccttgcaatggaaagtatctgggatcactcttcagatattgctaatacaaaggaaaaggttaagcttatcaaggatggtgtagatcgcgaaaactttaagctgacagtggaccttggagcattaggagcagtgtcagagtctatagaagaatggtttgcactctttggagaggatattatacattgtcactttacggatggtaagccggcaggctgtccgaccggacatatgccgtggggactgggagagcggaatatgcttgaagttcttaaggcatttgaggcaaatgagtataggggcggattttctatggaatatgtggatgcaagaagctttaggaatcccgaaaagtgggacaggcagacagtagaacagtttgaatcctgtctggagagaatgtaggaggtaatagtagatgattaagatatgtaggatcgatcatagattgctgcatggacaggtagctttcgtatggtgccgttcactgaatgcggatgcgattttgatcgtatctgatgcggtggcaaaagatgagatgcgcatggcgacgatgagactggcaaagcctgcaggtgtaaagctggtgatcaagagtgtcgaagattctattaaagtgattaacagcggagtcacagataagtataagcttatggtggtggtagaaaatgtacaggatgcctatgatcttgtgaaggcttgtgagaggatcaagagtgtgaatcttggaggaagcaagattgaagaaaaccgaagaaagctggatacggcgttctatgtggacgacaatgactgcagattgttgggagagcttttagatcatggaattgaacttgagattcgtcaggtgccagaagagaagaaaaagattgttacgaaagacatgttgagttaattgaggaggaaatatatatgctacaggcaatattgatcggacttattgtgtttattggaaaagcagattattttatcggaacagcaatgtttggaaggccgcttgtactgggtgctctggtgggaattgtactaggggatataccaacaggcgttatgataggattccaactggaacttatatttatggggatgcaggcgatcggagcttctattccgccagatatgatcgtaggttctgtccttggcacagcatttgcgattacgacgggaaaaggtatggagaccgcaattacgatcgctatgccggcggcaatcttgtcagcgtttgttgtcaatctgttctatggcgtcattacgccgatcatggcaaaggcggcggaccgctttgccgaggaaggtaagtatatgaagattgaaggtgtatttttaagtaatggattcttgtttgacctgacgttcgcagtgattgcctttggtgcatttctctttggcggagattcagttacggcagtggttaacgcaattccaggatggctgacgacaggtatcggtatcgcagcaggcattctgccggcacttggttttgcgcagcttatcaatatgatcatgaacaagaaggttgcggtattcttcctgttaggattcttgttaagcgcatatatgggaatatctacggttggtattgtatgcttctcagttgttatagtgggaatcttactgatcgtgaaggattttgtaccgaatcaaccagcattacagggaggaatggatgatgacaatgaattctagaaaaacattagagaaaaagcagttaaagagtctcttctggagatcatttaccacatcacatgcatggcattatgagagacagcagcatatggcatttgagtttgctatgataccggtcatcaacaaattatatgacaaagaagaggacaggatagatgcatataagagacatatggaattctacaactgtcagacggctatgcagccttttatctgtggagtggcagcggcgatggaagaagagaatgccaataatgaggagttcgatacctcttccatcagcgccatgaaggtagctcttatgggacctcttgcaggtattggtgattctctgatcggaggaacactgcgtgtgatcgcgactggtattgtagcaggtctgtgcatgagcggaagtctgttaggaccgatactcttccttctgatctacaatatcccgacgatcttacttcgttacttcggagtgaagttcggctatgggcttggtaatactttgattagtaagctgtcagagggagacctgatgaagaaattgacgatggcaatggcaatcgtgggattgatggtaattggtgcgatggtagcgatgactgtcgcggtaacgacaccgatcgcgttcaatatcaatgatacagcattttccttacaggagactctggatagtatcttcccgtgcctgcttccgatggcggtgacattgggactctataaattgaataagaagcatgtaagtgttcttgtgcaggtgatcggtatcatggtgctgggcattgtgcttggggcgataggaatcctgggctaaaggtacgataaaagataaatagaaaatacggaggagagaaattatggaatattgtttagatactggcgatcttgagatggtcaaaaaggtggcagacttatacccaatcaggtgttttagcatgaacccgagtatagcggtgaattgtctaaggggaacaggaagaaccttccttcagaatgcaaagatgatccgtgaagtgatcggtgaggacactccattttatctggaggcaatgggtgatactgcagaagagatgattgaggatgcgcataagatacgccaagagatcaagggaaatacaatgatcaagatcccggcgtgtccacaaggcttcaaggcaatccgtctcttaaaggaagaagacattctatgttcctgcactgcgatttatgattttaaccaggcaatgttggcggcagaggcgggcgcatattgtgtggcagtgtatgtaagccgtgttgataattcaggtggagatggaattgaggtagtaagaaagatcaaggaagcatttgtgatggaagggattgcgtgcaaagtgtctgccgcatcgctaaaacaggtaaattatctggagaaggcagccctcgcgggagctgacaatgtgacagtaaccttggatctgcttgagaagatggcgatacatccattgacacagaagacgttagatacctttagggcagactgggaaagcctgtttggagaaggaatgcgggttgccaatatgacagaatgatctatggagtgagtgacaagatgagcagaaatacaaattaccgggcgtgggggtctgtgggacattacctgcagggtcccggcctgctggaagaaattgagagttatacaagtggattcggtacaaagcatttctatatcattgatgtatttttctttgatacatggacacagaagctggcagagatctatgaaaacagtaaaagtacctttcaaagtgccgtatttgaaggagaggttacccgaagtaagatcagggaattccaggaacaggcagtgggaagtgacattgatacggtgatcgcgataggcggagggaagtccattgatgtggcgaaagtaatcgcggcggatcaggagtgttcgctggtagtctgcccgacgatcgcgtctaccgatgcgccgaccagtgcaatgtccatcttgtatagtgaagagggaaagatgaatgagatcatgctgcataagaagaatccggatctggtcttagtagacagtaagatgatcgccaatgctccggtccgtttcctggtggcaggtatcggtgatgcattgtccacgtattttgagggactttctaatgttcagacacagcatgagaactatgtgtggtgtgacaagaagccatttgtgagcacactcagcggacgggcggtcgcgaaagagtgctttgacaccctgatggcagacggaatccaggcgaagctggcatgtgagagacatatcctggtgccggcgcttgagaatattattgaaagtaatattcttatgagtggccttggatttgagaatgtcggctgctctgtggcacatgcgattgggaatgcgattacggttcttccagaaggagaacggatgatgcatggcgaaagggttggattcggtgtcgtgtgtcagatgatagcggagcattataatcaggagatgatagatcaagtgcttagcttttgtgtggatgtcggtcttccggtatgctttcatgatctacagatagaaccttccgaagggaatctacatctgatagcaagggaatctctggaagcagtatcctggcaggcatgcagcagaacttatggggaagaagatattgtgcagattatgcggatggcagatgcattaggctgttcttatctttctaagaagtaaaagaggaggatgccagactggcaggagagtttgtgaagcttgcgaagtctctggattcgatggtgacgatcaagaaagcggacaaagaagtcgatgcatcgaggcttctgtctctgatgggattaggtgtaagatgtaacgatgaggtgatggtttgtatagagggcggtaacgaagacgcagcatatgatgatatgaaacaatactttgaggcgaatttataagggacaggggctgtcgcactaaaatagaaattgaattgctccccgtcaagtagacaattgaaaaaatataaatttttcctggggctgtgaaaaaagaatagtccccccaaaaagaaagaccaagagtttataatgaactcaaggtctttctttctgttataattaacttgcaatgaaaattaataacataatctattctaacccaaaacaggcagttttgccaatgctaattcaagattatttggacatctgtgatccagtgctgacttttgatagatttatgggagaaatcgaactggagaaatatctgaaaaatattcctcaacatgatacaggaagactcaggtatgacccggtcagcatgctgaaaacagttttgtttggatttatggcgaatggctatatatcattgcgtgaactggaggatcagtgtaaagtgaatctccgcttcatgtatcttatggatcatcaagcaccttcttaccgcactttcggctacttcatcaacgaagttcttgctgattccattgaagaaatatttcaagacataaacaaaaaaatcttcaagacagaacatgtggatcttcaacatctatacattgatggatccaagtttgaagcaaatgcgaataaatactcctgggtatggaaaaaagcaaccgaaaaatccagataccgtctctttggtaagatcactacactctttgaggaaatcaatgaggaactttcatgtacaggtatgaaactttgtatcaatagtgaatacgcaccagagtatctgaaggaagctgctgaacagtatgcagaagtctggcagattaatgaagcaatatttgttcatggcaggggacatcgcaaaactacacagcaacgtcattatgagaaactcaaagggtatgctgctaagttggaagaatacgtggaaaaaatcaaaatctgtggagaagatcgcaacagctactcaaaaacagatcattcggccacttttatgcgaatcaagacagactacatgggaaatgaccagttgcttccagcttataatgtacaggtcggtgttgcagatgaatacattgctgttgttgatgtaaatcagtatcgttcagatatgggttgttttattccattaatgaacaagttttatactacatatggcttctatccgaagtacccagtagcagatgccggctatggttcttacaacaattacatcttctgtgagcagcaaggaatggaaaaatatatgaagtttcccatgttcaagaaagaaactacggacaagaaataccatgaagatccatttcgtgcagtaaattttccaatcggggaagacggaatcatgcgttgcccaaacgggaaaaacttttatcttcagtatcgaaaaaacgtaaaagggaacaagtatgggcgacaggaagaagtgtatcagtgtgaagactgctccggctgtccatacgcagaacaatgtaaaaagacagacaaaaaccgtactgttcggatcaaccgcgaacttacagcgatgtatcaggaagtgatagaaaatctcgaaagtatccagggagcgcttctaaggatgaacagatccattcaggcagaaggtacctttggtatcatgaaaaacgaccggtggtacaaaagaattgtccgaagagggataaaatctgtattgcttgaagtatttctcgtttctatcggacacaatctttataaatatcacaacaaacagaaaaaagttgcagctaccgcataggagttcataatagcattcttatgggggaaggggaattatgcccttttttatgtaatataactattattataatcataagcaaaaggacgcatgaaaaaactctcgttttttcacacgcccctcttttaacatctaatagaaaatatttatttgatttaaaattaatcgatatatttcagccatccttccggtgcttcgatacgtcccatctggataccggtcagtgtatcgcgaagttttgcgattgtaggtcccatctgttccattccactagggaagcagatttcttctccgtggttgacaatcttaccaaccggtgagataacagcggctgttccgcacagaccacattcagcgaagtcttttacttcatcaaagtaaacatctctttcttctactttcagtccaagataatgttctgcaacatacatcagagaacgtcttgtgatagaaggaagaattgttgtggagtgtggtgtaactacagtgttatcttttgttacgaacaggaagtttgctccacctgtttcctcaacttttgttcttgtagcggagtcaaggtacatattttcatcaaaaccatttgcgtgagctgtaacaattgcgtgaaggctcattgcatagttcagtccggctttgatgtgtcctgttccatgcggtgcggcgcggtcaaagtctgatacgcacagtgtcagtggtttcacgccgcctttgaagtacggtccaaccggagtggcaaatacacggaactgatagtcagtagccggttttactccgattacaggattgattccgaacatataaggtctgatgtaaagtgttgctcctgttccgtaaggtggaacgtaagcttcatttgcctttactgtctgaacaatagcatcaacaaatctatcttccgggaaaggcggcatctcaagacgtttcgctgagtcgaccatacgcttcgcattgaggtccggacggaaagtgacaatgtgtccatcctctgttgtgtaagccttcattccttcaaatacagtctgtgcatactgaagaactccggcacattcattcatgacgatgttaggatcttctgtgagaccaccttcatcccatgctccatctttataattagctacaaaacgcttatctgtagggatatatccaaatccgatattttcccagtcaatgttttttttctccattgtagtaaatcctccattcctttatgcggcgaaagaccgtatgatttctaattaacgctattataataccgtcaattaaaaaaatcaagagtgcgctctgttttttgaaaatgttttacggacatgtaattgtaagaatcaaaatcctgcaactaaacagttacaataactgtctgatatccggcacgcttcaatcggcgttccatttttacagcttcgtcaagcgtatcgtattctccgaccgttacccggaataagccgtccccttctgtcaaaacagcaggaaaattcaattcagttaattcattcaggagtcgtcgggcatatcgttcgctgcggaaagccccggtctgcactgcatagtgagggagagaagaagcattgctgatttctccgttttcttctaatgtatcaaggattccctcagcaatcgcaagcgcaatatcatcaaagttatcatcaaagagccggttatcagtgtcagagttgataaatccgacttctaccagaaccgccggcatctgtgtacggcgcagaacgaccagaccggggcgctcttttacgccgagattgatgaagccgagagcttccagaccttcattaatattttgagccattgtgtatttcagaccggatttgttgtaaaccagagattctacgccggatacggtattatctgtcggataagaattacggtgaatagacagaaagaagtctgcaccggctgcatttgcttccaatgctttctgatatggagattcataaatgtctgttgtacgtgtatagagtacatcaattccatgttcctgcagcagttctccaatggcaagcgttaaagataaggtgtcatccttttcccggcggccgttatagacagctccggggtcacgaccgccatgacctgcatcaagcatgatagaataagacatataatcacctcattattttgtgcttctatatattatatgaaagcgtgcattgcctgtgaaacgtcaaaaaatgccggctgcgataatacagccgacatttcaaaaagttctattcatgtgagtgtttatcagtttcagaagaatcagaagtttctccatccgcttcttctgtatctgttctttcaggaagataaacatgtaccgtttctacgcggttcttatccaacttctcgaccaccagacgaattccatcttcagtgacaacttcatcacccatctgaggtaaacggtccagatgttcgatgatcagtcctccgagagaatcataatcctcagagtcaagttctgtatgtaagtgatcgttcacatcatccagactcatggagccttcgataatatattcatgatcagaaatctctttgatcagttcatcttcattctcatcatattcatcatggatctcaccaacaatctcttccagaatatcctccaaagtgatgagtcctgccatctcaccgtattcatccagaacaattgcaatattaaaagtagaatctctcatctctacaagaagttcagagatatctttgaactcataagtgaaatgaggttttcttaagaaatcccggatattgaacggtgtatcatgatcataaagaagcagatccttcatgttaataataccgacaacgttatcctgtgtctcttcgtaaacaggaagtcttgtgaatttgtcttcacggaaaatatcaatcaattcatcgaaggtactattgacatcagcaaatgtaacatgtacgcgaggaaccataatatctttcgccttggcatcgccgagatcgaatacattgtagatcatctctttttcatcagactcgattacaccatcctcatggctgacatctacaattgtacgaagctcttcttctgtcatagctttgttcgctgcatccgggtctacgcgaaggatcagcatgattccacgggaaaacaagttaatgatgaaaataaccggagtcatgaccgtcataaaaaacttgatgaccggaatataacgaagcgtaagtttctcagcgttgatcgttgcataattcttcggtgtaatctctccaaatacaaggattgccactgtcagaatcagtgtagcgatgctgaccatgtatccgccaaatgaataagcaagggttgtggcaagagaagatgctgaaacattcacaatattattaccgatcaggattgcactgagcatctttgctgtgtgattctctgtgatatcaagagccagagccgcccgtttgttcccaccgtctgcgagagaacggagtttaatcttgttcactgacatcagcgcagtctcggttgatgaaaaaaatgatgaaaacaatagtaaaattaacagtataattaataggtacgtgtcacctgcgtccactttaaatattcactcctttgattaaaaaatgtgcctctaaagaggcttggttaattttagatatacgcattcattatacatggtttattagtgtttggcaaggcaatatactttactttatgaagtgggtggtgtatgatgttgatgactgataagaatatttaatactattatatagaagaaacggagtatagatatggaattatacaatagattgtgcactattacaaaacaggaaaatgtaatgaaagatgagccgatgaagaaacatacaacatttcgtattggtggtccggcagattatttcgtgacacctgaatcaaaggaagagatccaggcaattgttgagttatgcaaaaaggaggaaatcccatattcagtgattggaaacggaagtaatcttcttgttggagataagggatatcgtggcgtaattcttcagatttttaagaaaatgaatcagatcagggtagaagagaacaagatttatgccggtgcgggcgcacttctgtcgaagatcgcggcaacagcactgtcagaatctctgacaggttttgaatttgctgccgggattccgggaacattaggcggagccgttcgcatgaatgcgggtgcatacggtggagagatgaagcaggttcttgagagcgtgaaagtgatgacagcagatggcggattccttacgattcctgtagaagagatgggacttgcttaccggacaagtgtggtagaacagaagaattatattgttcttgaagcagtgatttctcttgaaaaaggaaatccggagaaaattaaagaagtgatggatgatctgaaagaaaaaagagtgacaaagcagccattagagtatgcaagtgcaggaagtacatttaagcgtccagaaggatatttcgcaggaaaactgatcggagatgcaggacttcgcggattcagggtcggagatgcacaggtctctgaaaagcattgcggtttcgtgatcaacagagggaatgcaagcgcagcagagattatggaactgatgcgtcaggtagaagataaagtagaagaaaattcaggagtccgcctggaagcggaagtaagaagaataggagagttttgatatgcgttttgttatcgtaacagggatgtcaggagccggaaaaacaacagcacttaagatgcttgaggatatgggatatttctgtgtggataatctgccaatcgcaatgtttcctggatttgtgcagatgatcgagaattcagaaactccaatgaagaaagtggcattgggagtcgatgtgcgaagcggacaggatatttccggattagagaaagatcttgagcagatggatcaaaaggggattaaatatgagattctgtttctggacgcaaaggattctgtacttgtaaagcgatacaaagaaacgagaagacagcatcctctgagcggatcgggacgtgtggataccggtattgcgaaagaacgtgagaagaccgcatttttgaaaatgaaggcaacgtatattcttgatacaagtaagatgctgacgagagaactgaagattgaacttgagaagatttttgtgaaaggtgagagcttttgcaacctctatatcacagtaatgtcctttggttttaaatacggaattccgcaggacgcagaccttgtattcgatgtgcgttttcttccgaatccgtactatattgatacattgaaagaaaaaacaggaaatgatccggaagtccaggattatgtcatgcagaatgataagggaccgattttccttgaaaaattaaaagacatggttgaatttctaattccaaattatattttggagggaaaaaaccagcttgtgatcgcaattggatgtaccggtgggaagcatagatctgtaacgctggcaaatgcgttatatcacacgcttgagacagaggaaagttatggcgttcgtattgaacatcgtgatattgggaaggatagtatcacaaagagaaagtaaaaggtggaaaatatgtcattttctggaaaagtgaaggaagagcttgcaaggaacatcagttcagccagacattgccagattgcggaactgacggcttttattggcatgtgcgggacagttgtaatcaatagttttgaccggtgcagtatcaagattcgtacagaaaacattttagttgcaagaaaggtctttacattaatagaaaaaacatttaatataaggggtgatatttccgttcggagaaatataaagaagcagacagagacctattccgttatcgtaaaaaaacatgaagatgcgatacgtatcttacaggctacgaagatgatgggggaacagcaggagaatgcggaagagttgcatgccgtgaatccgatgattgttcaacaggtttgttgtcgaagagcatttctccgcggagcgtttcaggcgtccggatctatgagtgatccgaacaaggcatatcattttgagattgtctgttccacagaagagatggcacatcagatctgtgacctgatctgcagtttttctatggacgcaaagatcgtgctcagaaagaagtcgtatgttgtttacctgaaagaaggagcacagatagtagatattctaaatatcatggaggcacatgtctcattaatggaacttgagaatgtaagaattctcaaggagatgagaaattctgtgaacagaaaagtgaattgtgaaactgccaatattaataagacagtatcagcagcagtgaaacagctggaagatattacatatttgagagatcagataggatttgagaatataccgaaaggattagtcgaggctgctcttgcccgtctcgagcatccggaagcaacactgaaggaactgggagaatccctgaatcctccggttggaaaatcgggtatcaaccacaggctgcgtaagctgagtgagatggcagacaaagttcggcaagaacaaggaggattattatgattaagacatctgttgtagtgaaagcggacccagggtttgatggacggccgatcgcccttctcgtacaggaagccagccagtatgcaagcaaagtgtacattcaggtagccgagaagaacatcaatgcaaagagtattatgggtatgatgagtctgaatctgatcggaggcgaggagattaccgttgtgacagacggcgaggacgagcagaaagcagctgaaggcattaagacattttttgctaacgtataataacaataagatggtaattgaagtcacagagagataaccaagtgattacaaatgaatatagaggggctgtactttgaagaggagtacagccatctttttctatgggggagagtttgcagctgatgtgaacacaaatgatttttgaataaggaggtatttgtttatgaaaagaatgctatttgtttacaatccgaattcaggaatgggacttctgaagccgaaactttcagatgtgattgacacttttgtgaagggcggatatgaggtgacggtttatcctacacagagaagtcaggatgctgtaagaaaagtcagtgagtacacagaagaatatgatctcgtgacatgtagtggcggagatggtacattggatgaagtcgtgaccggtatgatgatgcgagaaaataagacgccgatcggatatattccggccggaacgacgaatgattttgcaagtagtctgcatatttccaagaatatgctggaggccgcagatacaattgtaacaggaacaccattttcctttgatatcggtcagtttaacgatgactacttcgtatatattgcagcctttggcattttcacagacgtgtcatatgagacgaagcagagcatgaagaatattcttggtcatatggcttatattctggaaggaaccaagagactgttcaatattccgtcttataagatcaaagtcatacatgacggagagacgattgaagatgagtttatctttggaatggtgacaaattcacgctctgtaggaggattcaaaagaatcacaggagaaaatgttatttttgatgatggtgtttttgaggtgacactctttaaaacaccaaagaatccagtcgagttgaacgaactgcttggggcaattgtgatgcgtcagattaattcagacagaatatactccttcaagagtggtgaagtccgttttgaatctgttgaggcaattccatggacgctggatggagaatacggcggtactcatgaagaagttgtaattaagaataaaaatcaggcacttcagattatggttaaggaagaagccgtagaagatctgagtgaacagttggtggaagtagaggaagtctgaacacataatctgaaatattttcagtgatattttagaaaatcaccccttttttgaatttgaagcttgttgaacaatcgccgcaaaccgcgtaaaatcaagggaaaacggcaatttgaaagaaaaataataattttttgaaaaaaattaaaaaaaggggttgcattttctgaaagcctggtatataataactattgtcttgtggcggtaacaaaaaagacacagacgaaaatgaataaggctccgtggtcaagcggtcaagacgctagcctctcacgctggaatcaggggttcgattcccctcggagtcactgaaagaagctcgtatttacgagctttttttgtgctttgaaaatcttttagcaaattaaaaagtgggtgatattatgcaagtaacttatattgatcacagtggattcatggttgagtctggatcgtgctattacatttttgactattataaaggtgaactgccaaagcttgacaaagacaaggaagtaattgtcttttgcagtcattttcatcaggatcattttaatccgcagatttttcaaatccttaaagatatggggctgaattatcaggcggttctggcgaaggatatcaacaaaagaaagtatccgacaggtgtgaagatcacaactgcttatcatgatgaaagttatactcttgataacggcacacaagtcagtacgctgctctctaccgatagtggagttgcttttattgtaaaaacaaaggacagtacaatttatcatgctggtgatctgaatgactggtattgggagggtgaaccggatgcggataatcgtcagatgacatccaggtatcgtgcggagattgataaattgaaaggcattcattttgatgctgcatttgttccacttgatccgagacaggaagaccactatgcggatgggatgatttattttctggaaaaggtagagtgtgaagctgtttttccgatgcattattgggatgatccgaaagtcattgacagatttattgcggaatatccaaaatataaatcacgaatcagaaatacagagttagcaaaaggagaaaagtgcggtcataccgaataaataattattggttatattgtacaaaaataagaacaatccacagagggcagaagaaacccttgtgaaaatgttaacgataattgtaactgcgtactgttttttatgcaaaacataagattgtcatttataaattaatacgctataatatagaagaattctaaataaataattcctgatggttttcacgggcgtcaggatctttaagaattggaggaaagaaatatgttagtatcagctacagaaatgcttcagaaagcaaaagcaggccactacgcagtaggacagttcaatatcaacaatcttgagtggacaaaggctattcttacaacagcacaggaactcaactcaccagttatccttggtgtatctgagggtgcaggaaaatatatgacaggatataagactgttgtaggtatggtaaacggaatgatggaagaacttggaatcacagttccggttgctcttcaccttgaccacggcagctatgaaggatgcctgaaatgtgtagaagcaggattttcatctatcatgttcgacggatctcattatccgatcgaagagaatgttgagaagacaaaagaactcgttaagatcgctcatgacaaaggaatgtcaatcgaggcagaggttggatccatcggtggagaagaagatggagttatcggaagaggcgagtgtgctgatccggaagagtgtaagagagtagctgatctgggaatcgatttcctggcagcaggtatcggtaacattcatggtaaatatccggcaaactgggaaggattaagcttcgagactctggacgctattcagcagcgtacaggagatatgccactcgtacttcacggtggtacaggtatcccggaagatatgatcaagaaagcaatctctcttggagttgctaagatcaacgttaatacagagtgtcagctttcttttgcagcagctacacgtaagtatgttgaagaaggaaaagatcttgagggtaaaggatttgacccacgtaaacttctcaaaccaggcgcagacgcaatcatggaaacagtaaaagagaagatggagttattcggatctgtcggaaaagcctgagaagaacttttttaaaaaagcacttgcgttttaaagcaagttgaggtatactgactcacgtagacagaacaagggcgttccaattataattggagtgcccttttttatgtattaggaaagtcctttcctaatacataaaaaacgctccactaaggatgcgcactgtggcgtacaaggtagatgtcgcaagcgaccgccgcaggcgccaaaatgtgccaaggcacattctttgttatcccttgggaaatgatccgcatgattgaatcagattgaatttaatgaaattagatttcatccgactggatcagacggatgatttcctgagaggtgatctatcaaaagggttcccgtagtgaaatcgagttattgctcattgcagtgggcggtaatcggaggattaagagaaaaggaaggtataggatatgagcacagaattattcaatgtagctgacatctttggagagaacgtatttaacgatactgttatgcaggagcgtctgccaaagaaagtttacaagaatctgagaaagacaattgaagaaggaaaagacctggatctcgagacagcagatgttattgctcacgagatgaaagaatgggcaattgaaaaaggagcgactcactatacacattggttcctgccacttacaggagttacagcagagaagcatgattcctttatctcagctccgcttccaagtggaaaagttctgatgactttctcaggaaaggaattgatcaaaggtgagccggatgcatcttcattcccgtcaggaggactgagagcaacattcgaggcaagaggatatacagcatgggattgtacatcaccggcattcgtaagacaggatgcaggcggagctacactttgtatcccaacagcattctgctcctatacaggagaggcactggatcagaagacaccgttgcttcgttctatggaagctatcaataaagaagcattaagacttcttcgtttatttggaaatacaacatctaagaaggttactccatctgttggagcagagcaggagtacttccttgtagatgcagagaagtttgaagaaagaaaagacctgatctacacaggacgtacactttttggagcaatgcctccgaaaggacaggagcttgacgatcattacttcggaacaatccgtcagagaatcgcatctttcatgagagatgtaaatatccagctttggaaggtgggtgttccatcaaagacacagcataacgaggttgcaccggcacagcatgagctggctccgatttatacagaagctaatatcgctgtagatcagaatcagctgacaatgcagacattgaagagagtagcttgtcagcatgggctgaaatgtctgcttcacgagaaaccgttcgcaggagttaacggatccggtaagcacaacaactggtctattactacagatgatggaatcaatcttctcgaaccaggtaagacacctcatgagaatacacagttccttcttgtacttgcctgcattatgaaagcggttaatgtacatgcagatctgctcagagaatctgcagctgatccgggaaatgatcacagacttggagcaaatgaggcacctccggcaattatctctatcttccttggagagcagcttgaggatgttgttgagcagctgatcagcacaggagaagctacacacagtttaaaaggtggaaagctggaaacaggtgtaagtacacttcctgacctgttcaaagatgcaacagacagaaacagaacatcaccgtttgcatttacaggaaataagttcgagttccgtatggttggatcaagagattctatcgcaaacccgaatatcgtactgaacacaatcgttgcggaagcatttgcagatgcatgtgatattcttgagaaagcagatgactttgatcttgcagtacatgatctgatcaaagaatacctgacagagaaccagagaatcatcttcaacggaaacggatactctgacgcgtgggttgcagaggctgagagaagaggacttccgaacattaagtctatggttgaagcaattccggcaatcacaacagacaaggctgtagaattgtttgagagatttaatgtattcacaaaagcagagcttgagtctcgtgcagagattcagtatgaggcatatgctaaggcaatcaatattgaagctcgtactatgatcgatatggcaagcaaacagttcctgccggcatttatcaagtatacaaagacactagcagatacaattaatgctgtgaaggcagcaggtgttgatgcgacagttcagacagaggcacttaaggaagtaagtgctctgatggctgagacaaaggcagcgcttgataggcttgtaaaagtgacaggtgaggcagcagcaaaagaagaaggcgaagtacaggctacatactatcatacagaggttgttccggctatggatgcactccgcacaccggttgacaaacttgagatgatcgtggataaagaagcctggccaatgccatcttatggagatctgatcttcgaggtatagaataatcttacggaaaagtaatttgaagtaaatgattggaagtcattattcggataaagagtctggataatggcttctttttgctgtacagatctggcaggctgcatgttactgttcacacgatgtgcgaccagcaacgcatctcgccattttaaatcgcctttggcgatggggcgagatgcattcaaatcaaaacacgcatcctccgtgtcaatcagcggagtgattgacacgggagtgaacagtaacagctgcataactcttgcatgcaagagagcaaaaaatgttgtataataagaattggttcgtgtagtttgagcgtgttctgcacgaatgagaaaaagaaagagtggaataaaaatgcagtcagaagcagaacttaaaagtttattatcaagaatagatcaccggggatatccggcttataaagatacaaaaggacagtaccgatttccgggatatgttttatcgatcgatcacgtacagggagatccgtttgcgtcaccgtcaaaggtaagtgtactggtgagtggaaagacagcaggattcccacaggaattatattgtggaaaatgtcagagaatcgcacttcaggatgaattgctgcgccagtttggaagaagggcagagaggtttgcattcaaggcgaaaggttcaggtaagagcggactgatctctgtcagcagatgcggacaggaagttttggagagaacagcgtgtcagatccagccggagaacggaaacatccttctgagaatggaaatcggatttccggcaaatgggcgaacgatcaatgcaagagaattagagaagattttatttgattttgttccggagtgtgtaaagccatccttgttttataagaatctggatgcaaaaagattgagaagaatcgtagatctggcagaagatcaggagtatatccgtaaagaacttccgaaacgtggtttgtgtgctttcgtggcaaacggaagtgtactgccaagggaatccggaatttcatccaggccgatgcgtgacggaattgccttccagtctccgacggagcaggaagtgacactggaacttccacataaaggaaagattaccggtatgggaatccgtaaggggattactttgatcgtcggtggaggttatcacggaaagtcaacacttttgaaagctctggagcttggagtgtacaatcacatcgcaggggatggaagagagtatgtgatcacagatgcgacagcagtgaaattgcgcgcggaggatggcagaagtatccggaagacagacatttccatgttcatcaacgatcttccgaacggaaaagatactacgtcattctgtacggaagatgcaagtggaagtacttcacaggcagcaaatgtgattgaaggaattgaggccggaacatccctgttcctgattgatgaagatacgagtgcaacgaacttcatgatccgtgatgagctgatgcagcgcgtgatccacagagagatggagccgatcacgccatttattgaaagaatcagagaattgtatgaaaattatggaatctcgacagtgatcgttgcaggaagttcgggagcttatttccatatcgcagacagtattatccagatggatcgttatgttccgaaagatattacagtactggcgaaaaaagaagcagagaacttcccgcagatcagcgtgccggagcagctagcaaaaaagccggcttatgacagagtgccgcgaccggatcaggcatttcacggaaatgacaggatcaagatgaagacgatgggaaaagaatctgtgatgatcaacagggatacgatcgatctgaggtatttggaacagatcacggatagcgaacaggtggcagcacttggctactgtgtacgatatgcgcagaagcatttgatcgatggaaagaagaatctgatccagattgtagatgagctggaagaagtgatgcagaataaatcgctggcggcattgtgcgagagtacatccagtgtatcctgtatggcagtgccgagaagacaggaaatatttgcgtgccttgaccggtatagagcgcttaggttaggataggagtggcgacatgaaattagagaatggaagaccagaaaacacagaaggaagattacagaaggaaatcagggtatatgatttactcgacaagcttggtgtggaataccagagagtagaccatgaggcggcaatgacaatggaagcctgtgaagaaatcgacagaacacttggagatggaaccgcaatctgcaagaacttgttcctttgcaatcgacaggaaacagacttttatctgctactgatgccgggtgacaagccattcaagacaaagaatctgtcggcacagatcggttctgccagactttcctttgcaaagccggaatatatggagaagtatctggatattacaccgggatccgtcagcgttatgggacttatgaatgatacagagggaaaagtacagcttttgatcgatgaggatgtaatgaaagatccgtattttggctgtcatccgtgcatcaacacatccagcttgaagattcgtacatctgatttgatcgcaaagatcattccggcgctgaagcatgcaccgaagatggtgaaacttccgggagcggagaagcaacagtaactattaatcgacactaggtccatttcctgttggttgtatatttttcgtgaatttgctataatctatatgttgatatgatacaaggatcaaaagctcatgcgtttcttgcttgcatgaaaaagcatgacttattgacccgcaaaacaccgaaaagtagccattttttgtagaaaaaatgagcggatttgaggtgttttaggattgcgagagcatgaaatgcgaagcaatccgtgtatcataggggtcaaaataccttttgaccccaacatcttgatatatgaagagcaggtatcattttcaggattaatgcggagaagataaaaggagaactatagtgtctgaagaaaataaagtgatagataaagtgaatacatcagaaatagtcgagcagccggtggatgcggaggagattccgccagtgaagacagaggcgataccaccggtgaatacggaaccaacacatcctttacagccaccggtagaaccggcgcagaagctggaagattattacaaagagactgtggaggatcgtgcagctgaggaagagtacgagcaggcggttaaagatccgcagaaccggaaggaaaagatcgatcagatcaagagtattttccaccgcagtggggagaagaaattttccagagaagaagtgattctttctaagattcgaccggaggatatgctggaatatctgacgttggaacagcgcagactggaatgcttacagaaagcaagacagagccggaatgagaagcttctcaaggtgcttcagcttgcggcgatacttgcagcaattgtagcggttgtcgctttactgaaggataatccggtcgttcttgtgaacattctgtatatgcttggtattgtagcagcaatctggatctggaagaatccgggaaagaagtaaatttactgtaatgaggtgatgatatgaagttttttcatttatcagacctgcatataggaaagcaattacatcactataacctccgggaggatcaggaacatatccttgcggaggttctttcatatgcagagtctatacatccggatgcaattgttatcgctggagatatctatgataaatccgtgccatcagcagaagccgtcagcttgtttgatgaatttctgacagctttggctaagattgaaccggtgattccggtgcttattatatcgggaaatcatgattcggcacagcggcttgattatgccagccgtttgcttggaagtcatcagatttatattgcggggcaggcaccggaggaagaagcagatcgtctgaaaaagattactttgacggatgagtttggtgaagtggatttttggctgcttccgtttttgaagccgggatatgtgcgtaaaatctttggcggagatgtgccggagagttatacggcagctgtacaaggacttctggagagggagaagattgatttctccagaagaaatgtactggtttcccatcagttttatacaggaaaaggagagtctccggtaacctgtgattcggaagtattatctgttggaggcattgataatgtagatatttccgcagtgcaggagtttgactatgtggcacttggacatttacatggtgcacagagagtcggacaggagaagatccgctactgcggaacattgttgaaatattcagtcagcgaagcaaaccagaagaagacacttcatgtagtcgaactgaaagaaaaagggagcgagccggagattcagaagctgccgttacatccgcttcgtgatgtacggaaactgcgtggaactctggaagagatccttgaagcggaggacggaaccgggagcgaagattatgtcagtgtgacgctgacagatgaggttgatccgtacaaaccgaaggagcagctggaaagaaagttccatcatatcctcgaagtgcgaatggataatgaaaggacgagacagaagctggaattttctgaagaacagatacggatcggtactccgtttgaaacattttgtgatttttacaaagagatgcaggggcaggaaatgtctgagcaggaacaaaagatcttaagagagattctaagtgaagtgaaaggggaagacgtatgagaccggtgagattgacgatgtccgcattcggatcttatgcgggcgtccaggagatagattttacaaagattcacagcggattatttctgatcaccggagatacgggtgcaggaaaaacaaccatctttgatgcaattatgtatgcgctgtatgaccggacgagtggcggacgcagagatggaaatatgatgcgcagccagtatgcatcagaagacacagacacttatgttgaatatgtgttttcttatcagggacaggaatataccgtgcgccgtaatccggaatatctccgggtagggaagagaagaaaagcagatggaagcctccggtatgtgaaagagacagcgaaggtgagtctccttcttccggatggaagggaatatcaggggaagaagcgagagacagaccagaagattcaggaaatcattggtcttgatgcggggcagtttacacagattgccatgatcgcgcagggagatttcttaaagcttcttcatgcagaatcaaaagaacgaaaaaagatattctcgcagattttccagacacaaatctactggcaaatccaggaagcactgaaagaaaaaggaagagatctgtatattgcgctgaaggaaagtgaatcagacattcggcgtgagatggagcgtgtggaatcggaggacacagatcagcaggatctagcagaccagtggaaagaactctgtgagttatccatgccggaaggggaaaaggttctggaggctgtgaaaaactttctcgaatatgaagaaagttgtggaaaagtcttaaagaaagaatcagaggaacttaagaaacagtcagaaacacttcgaatgctgattcagaagaaagaagagaagaataagatatttgaccgtttggaaatggaagagaagagtttgcttcttctgaatgcaaaacaggacgagatggaaacttgtcgggttcaggcagggcttggacaccgggcagagcaggcgagacatctggaagtgcaggctcttcgaacagcgaaatccgtgaggcagatacagggcgagatcgagcagattactgtatggcagaaggaacaggaaaaggaactttctgaggttaaagaaaaagcggaagaattggaagaagtttttgcaaaggaagaaccggaaatgttgaaaaaaatttcacagttatcggatctccttccacattacgcaaatgtgcgtaagtattcgaaagaatatgaaaatcagacaggggcaatgcagcgttgtatacagaattgtcaggaagcatcagctcagtatgaggaagcatatgcgaaattctttcaggagcaggcgggaatcctggcaaaggaattacaggaaggcacgccgtgtccggtctgcggatcagtagaacatccgcatccggcaaagatttccggagaagcaccggataaagagacggtagagaaactgaagcaaagacgtgatctgctggaacaaaaaagaatacagcagcaggaaaagtttcagatatgtaaagcacagcttgaatcagaacaacgtattctcggagataatcctgtgaaagaagagcaggtgaaagaagagcttcagaagatacaggttgaactggatcggaagaagaatgaaacaaagcaggcacaggaacagtgccgtaagatgacggaggaaagcagacgtcaggcaggaaaactggagggacttcgaggccagaaggcagaacttgagaagcgttttgtaaaagagcaggaagagttccgagaggagatcagccgacaggaatttacttcacaggaagaattccgtgaggcgaaacagtggatcgaagggtggcgggagaaagacaaagaagtgaaagaacatgaccgccagctgttagagaaaaaggcaaagatcgagacgctgaaggaacagactgcaggcgaaaagcgggaagacccgcagcaggagatagaaaagcgaaatgaagtagaacatctgttgaaagaaaaacaggatcatcagatgcagcttcacagcagatggacaggtaaccagaatgcgtacaagaatctgaaacaatatttttcttcgcaggaacttctgcgaaaagaatatgaggtactttccaacctgagcaagactgcaaatggcaatttgagcggcagtgtgaaacttgattttgagacgtatgtacagcggacttatttccggcagatcattcaggcggcaaaccgcaggctggcgcggatgacatcgaatgaatttattttacagtgcagggagattcaggatctgagcagtcagggacaggccggccttgatctggatgtctatgatctggtgacagattctgtcagagatgtaaagtctctttcaggaggagaatcctttatggcagccttatcaatggcattgggacttgcagatattatccagaatacagccggagcagtgagtctggagacgatgtttgtagatgaaggattcggatctctggatgatgcatcaagagaccgtgcgattcagattctcaaagaacttgcaggagagaaaggactggttggaatcatttcccatgtaaatgaattgaaagagcagattgactggaaattaaatattacaaagacggagcatggaagtcaggcaaaatgggaaatctaaaagcataaggcaataatagggacagctacgaagaaggacagaatacaggcaggtgcggaaaatgaaacaaaatggaatgagagaaagaaaaggaaggatttcaagatacggaagaaggatgttggcagttctgctcagcgcagggatgctgctgacagggactcttccggtatccggaacagaaaatacggaggaaacggcacgcccacatcagctttattgcacagtacttggagacagtattgcgaaaggttacacttgcgataaatcctggatggagaattatggaagtctggcagcaaaggaaatagcatatagcgaagggtgcagatatatttatcacaattatgcaagaacaggtcttgatacagcaggattgaacgaaaagtatttgtcaaagcaggatgtgcagacgaatcttgcaaaagcagatgttatttttataacaattggttcgaatgacctgctcaacgaatgtaagcgtgtggttcaggaaatcctgaagacagatacaaaatttaaaagtgcggatgaggcacttgcatctttgaaagagtctgtaaagaagaatccgctgcttgtgctgagtgcgatcaacgcgttgaacaactgggattataattcctttgaaaaagaatggattcagatgatgaagacagtaaattcattgaaaaaggacgatgcaaaagtgatcgtgactacaatttataatccggcaggaaatatgaagcttccgtctacgctgaataaaattgtagaagacattattgaaaatatgaacgcgatcattgaaaaacgtgcgggaaaatacgattatgaagttgcggatgtgtatcagtcatctgtgacatcacatctgcagaaagatggagtacatccggattcacaggggcagcagatcattgcagatctggtttgtaaggaatacgaaaagtaaaaaaggcattctttgtgttggttcttatatggaacaatgcagagaatgctttgttgtatattaggaaaggactttcctaatatacaacaaacgctccgctcaggatgcgcactgcggcgtacaaggtaggtgtcgcaagcgaccgccgcaggcgcaagaatgtgccgaggcacattctttgttctttttacaagaaatagaactgtcacatttataacacaaaacattcacagaactctgatacttttgaaaagtcaaaaatctcggtttgtctgcatagatatagactggaagaaatatagggaggtaagactttgatagaagtaaagaatcttgtgaagaagtatggaaatcatacagcagtagatcatttgaacttcacaatagaggaagggcatgtctacggctttcttggaccgaatggggcgggaaaatcaacaacgatgaatattatgacagggtatctcggtgctaccgaaggagaagtgctgattaatggacatgatattctgaaagagccggaggaggcgaaaaggcagattggttatctgccggaattgccaccgttgtatatggagatgacagttcgtgaatatctggaatttgtagcggagttgaaaggaatcgctaagaagaaaagaggagagtctatcaatgaagtagagaagatggtgaagatctgggaagtggaaaaccgtctgatcaagaatttgtcaaaaggataccgtcagagagtcggactggcacaggcggtgcttggattcccggagatcatcattcttgatgaaccaagtgtcggacttgatccaaaacagatcatagagatccgtgaactgatccgtcagcttgcgaagaaacatacagtgatcctgagttctcatattttggcggaagtccgtgaagtctgcgattatattttgatcatttccaaaggaaaactggttgcaagtgacacaccggagaacctggaacggaatctgggagattctgatctgattgagatcgagacgaaagcaagcccggacgaagttcgaagaattcttgagacagtagatggaattcgaagcatttctacaaagcatctggaaaatggaatcacatgggctcagattcaggaaaagaaaaatacagatatacgtgagaaagtatttcaggcatttgcacagaatcatcagccactgctgaaactgaatccgctgcaggtaagtcttgaagatgtctttatggaactgacgcagagcgatagggcagcagaagaatatgcagaaaaggcgaagaagaaggaaacggaggacatgaaagatgctggcgatttataaaagagaagtacgctcctattttcagtctatggtgggatgcgtgtttgttgcatttcttattgcatttacaggaatctactttatggcatataacctgacagccggatatccatacttttcctatacgctttcaggtacactgatcgtatttatagtagggattccgctgatcacgatgcgcagtttttcagaagagcgtaaaaataagacagatcagctgcttctgacagctccggtcagtctgtggaaggttgtgcttggaaaatatcttgcaatggtaacggtaattggaatcccgaatgtgatcttctgtgcgttcccattaatcattaaggcacagggaactgcatatctgaaagtagattacatatccatcggggtattcttcctgttgggctgtgtatatgcggcgatcggcatgttcctgtctgctctgacagaaagtcagataatcgcatttatcagtacatttggtattctgcttatcttgtatctttggaatggaattctttccatgcttccaagcagtgcagtcagcggattggtcggtgtgcttattattctgactctgattgttgtttatatttatcagatgacaggaaatatagtgattgccggtgtgatcgaagcagttggtgtgatcgccggtgtggtcgtgtactttgtaaaatcaagtctttatgaaaacctgctgacaaagatgcttggaagactggcacttgcagatgtatttacggatatcacttcgaacagtattgtagatataacaggaatcgcgctgtatctttcactgatcgtagtctttgtgttcctgacagtacaggcaatccagaagagacgttggaattaggagggcatgaaagtggatagaagaaagaaaacaacaggaaagatcaaagggatgttccacacctccggtacaaagcacggatcttacagtgtggggctgacagtacttgtaatcgcgattgttattgtgttcaatctggtaatcggacagatcccggaagcttatcgcaatctggatatgagcagtacaaagatttatgaaatttcagatacaacaaaggatctgctaagcggattgaatgataaagtcgatatgaaagttcttgcggtaaagaaagacacggatgacaggattaagacatttatcagtaaatatgcagcactttcagatgagatcaatgttgagtggatcgatccggttctgcatccgtcagcattgacagagtataatacatccgaaaatacaatcgttgtatcttgtgaagcaacaggaaagacaacaactatttcttttgacaagattcttgttatggatatgtcttcctattattcaggaaatgcatcttattcagaatttgacggagatggccagttgacaagtgcggtgaattatgtgacaagtgatgtgcagaagacaatctataaagtaagcgggcatggagaggcggaactgtcatctacagttacagatttgatgagtaaaaataattacacgctgacagagctgaaccttctgatggcagattccattccggatgattgtgatcttctgcttatgaatgcaccgacgaatgacctttcagaaaatgaagtgacacttctgacaaattatctggcagcaggtggaaaagtgatgtgtctgcttggggatacctctctgacggatttcccaaatctggcaagtgtgctgaaggtgtatggaattgaaggtgtagatggttatattgcggatccgacaagatgttatcagaaccagccatattatatcttcccacagttgaatgtatccggtgatcttgcgaacggaatcagttctcagatggtgcttttgacgaatgcacatggaatgacattgacagatccgacacgagatacgataacaacaagtgcatttatggagacatcggaaaatggatacgcagtaacagagtccgaacagaaacagggaacgtatgaacttggagttgtcgcaacagagacaatttcttcgggagatgattcttcttcggatagttcagatgccgaggcaacagatacaacaactgatgatagtgaaagtacggaagattctgaggaaagcagtgcaacagaagcccgtctgacggtgatctccgcaggaagtctgatcgatcagaatattacagatgcattttcacagcttgagaatacacagatctttatgaatgcagtaagtgcaaactttgacggagtacagaatctgtccattgaggcaaagagtcttggaacagagtataatacgatacagcatgccggtctgttcagccttcttgtaatttttggaatcccggcagtgattctgatcgccggattcagcgtatggttcagaagaagaaaagcttaaggaggaagaaaattagaatgaagaaaaagaaagggccattgattctgatcggtgttctggtgttgctccttatcctctattttgccttaagcacatggaataagaagcaggattccaaggaagaagaaacggtgaaagtgacagacctgaagacctcagagattaccggggtgaaatatgatcttggtacgggtgaaatgaattttgagaaaggcggagatacctggtactataccgcagataaagatttcccattgcgtcagagttatccgaagacagtggctgatgctatgggacagttgagtgcggatcgagaacttgaggatgcggatgcgctagaagaatatggattagatcatccgacttatacagttacactgacaaatgaagatggaactgtgacaacaatcaaggttggaaatgcgaccggaaatgattactatgcgacagtggacgatacggaaaaggtttatacaattccggcgacttcattggatgatatccagacagaactggatcagattgctcagctggatacttatccaagtatcggaagtggaaatctgaaaaaagaagtgatcacacagaacggtgagacaacaacctatgattccgaaaatgaggatcaggcagaagatgttgcagcagtagccggaggacttggcgccgcaactctgtcagaggtagcaaactattctgtagacgatgcggatcttgcagggtatggtctggatgcgacttccagaatcacagtagaagttacttatacaagtgatgatgaagatcagacaatgacgctttacatcggaggagaaaatggaagtggagacagatatgtcatgatgaatgattccaggatcgtgtacctgatctcggatgaaatctgtaataatatattgaatcaataaagactggtaactgttcggagaaaacgaagaaaattcggtgcgtttcctttggacagttaccacattttatatttatttaattgacttttattcgaaaacagcgcagaataaagcacatatcgtttttatagaaaatgcatagcattttggaggttggctctgaacagttagagataatataattggcgagatgcacagcagagaagtatgggcagtaaaaatgtgcatgagcagatttatcaagaaagaaggatttgtatgaaagaaaaatttttacgttttatgcagggcagatatggcgtggatcagttttctaaaggtctgctcattgccggactggtagtagtactcttgtcctcattttttgcaggaggaagggtaggatcattattctatttacttggatgggtattgatcatttattgttatttccgtatattctccaaaaatgtatctaaacgatatgcggaaaatcagaagtatcttgcaaagacatacaagattaggacttatattcagcagcagaagaacagtctggcgcaaagaaaggcatatcatatttataaatgtccggggtgcaaacagaagattcgtattccgaaggggaaaggaaagattgagatccgatgcccgaagtgtggaacaacatttattaagaagagttgatgtgtttactggagagaaagcatctgttatgataggtagtgcgtgttagaatgaatgcgagagaaagaatgagaggacgggaaggatgtcagatccatacagtatattaggtgtagacaggaatgctacggatgaagatgtgaagaaagcttatcgaaagctgagccgacagtatcatccagatgcgaatatcaataatccgaagaaagatgaggctgaggcgaagtttaaggaagtgcagcaggcttatcagcagattatggatgaacgcgaaaaaggatatacttccggatatggttcgagtgatggttcaggttatggaggttacgacccgtttggaggattcggcggttttggttcttatggatatggttcagcaggaagtacgggcggaacttccgggatgagtgaggaagatgcacatctgaatgcggcagctaattacatacgaagcggacattataaagaggctcttaacgtacttgacggaatcagtcagcatagtgcaagatggtatttctacagcgcatcggcgaattccggattaggaaataacgtgaccgcattggaacatgcgagagaagcagttcgtctggagccacagaatatgcagtatcagatgttacttcaacagctggaaggtggcggaaactggtatcagacaagacagacaatgtacggatatccgggaacctataatagtagctggtgtgtgaaactatgtattgccaatctgatgtgcaatatttgttgtaacagtggcggactgtgcctgggaggcggtccgggtggcggaacatttatgtaagaggaatagaagaggagaaccgagaatgttaacacagttttcgagaacagaactgcttttaggcaaggaagcaatgaacaagctggaagatgcccgcgttgcagtatttggtatcggtggtgtcggcggctatgtctgtgaggcacttgtaagaagtggtgtaggaaaatttgacttgatcgatgatgataaagtgtgtctgacgaacttgaatcgtcagatcattgcaacgagaaaaacagttggaaaatataaaacagatgtgatgaaggacagaattctggagattaatccgaaggcagaggtgaatattcacaattgcttttttttgccagatactgcagatgaattcccttttgaagaatatgattatgttgtggatgcagtagatactgtgacggctaagattgcgcttgtcatgaagtgtaaagaactgaatgtgccgatcatcagcagtatgggggcggggaataagctggatgcaagtgcctttcgcgtggcggatatctataagacgaaggtgtgtccgctggcaaaggtaatgcgccgtgaattgaagaagcgcggtgtgaagaagctgaaggtagtttattcagaagaacagccaacccggccgttggaagatatgtctatcagttgtcgtgcaaactgtatttgtccgccgggagcagaacataaatgtaccgagcgccgggatattcccggaagtgttgcgtttgtaccatctgtagccggtctgatcattgcaggagaagttgtaaaagatctggcaggaattaagaaaaaataggataacgggggaaaaaatgggtatttcaatagaagaactccgcaagctggagaaagatagttatcagatcctggatatcagaaatgagacagagatttcacatggagcaattctgggagcgattgcggttgcggaagatgcaattgacgggcatccggagattgattttacaaagaaactggtcatctgctgcagcagaggagagcatagtgtggaagtggcagagacactggaagaaaaaggtgttgatgcagtcagtctgaacggcggatatattgcctggctgattgatacgatgaagcaaaaagaggcggaggatgcgaaagaagaagtgaacttcgcaaaagaggtagagcagagtttaaggaagaagttcagaaaaaacatctggtgcaagtttaccaaggcgatcaatgagtatgagctggtaaaaccgggagacagaattgcagtctgcatctccggtggaaaagattccatgctgatggcaaagctttttcaggaattaaagcgtcataataaatttgattttgaagtgaaattccttgtgatggatccgggatacagcccggcgaaccgccaggtgatcgaggagaatgcaagacgtctggagatcccgattgagatttttgaatcagatatctttgaatccgtctataatattgaaaagtccccatgttacctgtgcgcaagaatgcgccgcggatatttgtacagtcatgcacagaagatgggctgcaacaagattgcactgggacatcattatgatgatgtgatagagacaatcctgatgggaatgctctattcggcacaggtacagacgatgatgccgaagctgcacagcacaaacttcgaggggatggagctgatccgtccgctgtatatggtccgcgaggatgatattaaagcatggagagattataatgatctgcatttcattcagtgtgcatgcaagttcacagatacatgtacgacatgtaataatgaggagaaccgttccaagcgtatggagatcaaagaactgatcgcaaccctgaaaaaggtgaatccatacgtggagggaaatattttcaagagtgttgaaaatgtaaatctggatactgtagttgcgtataagtcaaaaggtgagaagcatcatttccttgacacttacgatgagaagtcggaagaacaaggtgaatgatacggtgctatcgatgtaaaatataaaaagtggatataaaaatgctaaattgaaaaattaagaaagaggcttgacttctgtttgtccccatgatacaatatttgggcgaatggaagtaggctttttttttatgcctaaaaattgatggctcgcaaccatcagcaacacgtaggtgaatatattaaaagcgaggtggaagttgtgcgcacaagaattactctggaatgtacggaatgcaagaaccgtaactacaacatgacaaaggataagaagactcatccggaacgcatggaaaccaagaagtactgcagattctgcaaatcacacacactgcacaaagagacaaaataattgttgtcgaaaggaagtggaattatgggtgagaatacaaaaactcagaaaaagagctggttcaaaggacttaaggcagagttcaataagatcgtttggccagacaagaatacacttgctaaacagaccacggcagttgttgctgtctccgtagtgcttggagcgctgatctcagtagttgatgcgcttttgagatatggaattgactttttagtgaaatagttgaccgcagcagaaaggtgattttatgtcagaggcaaaatggtacgtcgttcatacctattcagggtatgagaacaaagtaaaagcaaacattgacaagacaattgagactcgtcatctggaagaccagattttggaagttcgtgttccacttgaggaagtacctgagatacgtaatggagtggaaaaggtcgtacagagaaagatgtttcctggatatgttatgatccacatgattatgaatgatgacacttggtatgttgtaagaaacacaagaggtgttacaggattcgtcggacctggatccaagccggtaccacttgatgagagtgagatggagaaccttggaatcaaacaggatgaggtgatccttgatcttgagatcggtgatgttgtaactgtacttagcggtgcatgggaaggaacagttggagctgttcagacaatcaacgaacagaagaagagtctgacaatcaatgttgagctgtttggccgagaaactccggttgaacttggtttttcagaagtgaagaaaatggattaaaattgcgtgggagggatgagaatcccgccaataccacaaggaggtaattgaaatggcaaaaaaagtagaaggatatatcaaattacagattcctgctggaaaggcaactccggcaccaccggttggtcctgcacttggacagcacggtgtaaacatcgtagaatttacaaaacagttcaatgctagaacagcagatcagggagatcttatcatccctgtagtaatcactgtttacaatgacagaagcttcagcttcatcacaaagacaccaccggcagcagttcttattaagaaagcttgtaagattcagtccggttctggtgtaccgaacaagacaaaagttgctacaatcacaaaagctcaggttagagagatcgctgaaatgaagatgccagacctgaacgcagctacagtagaggctgctgagagcatgatcgctggaacatgccgttccatgggtgtagttgtagaagactaatccaaattttataacgattatattgtaggatacaatcagccgaccttttccggtgtcctcgggggagagagcgctgagagttcaattgtttagtaaattcataaagtgggaggggcaagttcccgccaataccacaaggaggttattgtaaaatgaaacgaggaaaaaaatatatcgaagctgcaaaactgatcgaaagaggaaacctctatgatcctgcagaagcagtagcattagtaaagaaatcagcaacagcaaagtttgacgagacaatcgaagctcatatcagaacaggttgtgacggacgtcacgctgatcagcagatccgtggtgctgtagttcttccacacggaacaggtaagaaggttcgcatccttgtgttcgctaaggacgctaaggctgaggaagcaaaagcagcaggtgctgacttcgttggaggagacgaactgatcccgaagattcagaacgagggatggcttgacttcgacgttgtagttgctacaccggatatgatgggtgttgttggacgtcttggacgtgtactcggacctaagggacttatgccaaacccgaaggctggtacagtaacaatggacgttacaaaagctatcaacgatatcaaagctggtaagattgagtacagactggacaagacaaacattatccatgttccgatcggaaaagcatcctttacagaggagcagttagcggacaacttccagacgcttatcgatgcaatcaacaaggttagaccagccgctgttaaaggtcagtacctgaagagtgtaactcttacatctacaatgggacctggcgtaaaggttaacccggttaagcttgcataataaaatgtaaaagagacagttgcgagactgtcatagaggagggtctgctttcggcggatcctcttttgaaaaaaattttgaaaaagaaaaaagaaaaagatgaaaaataggcttgacatatggaaaataacatggtattatagcctagcaactgccgaagacagtaggtgctgaaaagcgtaagttatgaacgcctaccgaggaagaatgaatttttacatgcgtatgaatttgtagaacctccacgtctttggacctggagatttttttagtttcagcagagtgatctgctgggaactttggcagtacacgaataatataaggaggtgtaccgaaaagtggcaaaggttgaagtaaaacagccaatcgttgacaagattgcagaagagattaaagacgctcagtcagtagttctcgttgactaccgtggacttacagttgctcaggatacagagcttcgtaaacagcttagagaagctggtgtgatctacaaagtttacaagaacacaatgatgaagagagctttcgagggtactgaatttgcagcccttgatgactgcctggaaggaccaagcgctattgctatttctaaagatgacgcaacagcaccggcaagaatcctttacaaatttgcacaggatgctccggcacttgaacttaagggtggtgtagttgaaggaacagcatatgatgtagcaggtatttctgaacttgctaagatcccttcaagagacgaactgctttccaagttgcttggaagcttacagtcacctatcacaaactttgctcgtgttatcaaacagatcgcagagcagggtggagaagcggctccagcagaagcagcagaggagacagcaacagacgcagagtaatatgtgtcagctgatctggatacagacagcatatatgagcagatgctcatctaattaattaagaatgaaaagaaaaatggaggatatttaaaatggctaaattgacaacagctgaaatgatcgaagcgatcaaagagttatcagtattagagttaaacgagcttgttaaagcttgtgaagaagagttcggcgtatctgcagcagcaggcgttgtagttgcagcagcagctgagggtgcaggagcagcagagaaagatgagttcgacgtagagcttacatccgctggagcatctaaagtaaaagttatcaaggctgttcgtgagatcacaggtcttggacttaaagaagctaaagagcttgtagacggagctccgaaggtagttaaagaggcagtttctaaagcagaggctgaggaaatcaaaactaaacttgaagagcagggagcagaggttactcttaaataattttcttgaatataagtttattccgaccgcagaagatgatatgcttctgcggtctttttgcgaaagaggcgttagaaatggatgcagttgagttgacgagagagctgattaagatagaaagtacggatccgggaagctgggaaaccgagattggtgaatatatctgcgactatttgaaagagagtggagcagatacagagacttacgaagtagagccgggaagaaaaattgtaaaaggtgttgtgaaaggtgcgaaagcgcatccggcactggtgtttatctgtcacatggatacggttgttaagggcgaaggatggacaaagaatgcattcgacgcagaagtttcagatgggaaaatctggggacgaggagcttgtgatatgaagtcaggacttgcaagtgcgttgacagcatttgcggaggtggcaaaatcacagaaagagaatgctgaggatatagaaaaacttccgggaacattagtctttatcggaactgtagacgaggaagcagatatgaaagggtcagaagcagcagtgcaacaaggatggattcagaaggaagactgggttcttgatatggaaccgacttccggaatgattcagatggctcacaaagggagaacctggtttgaacttaatgtggaaggtattactgcacatgcgagtatgccggagaagggggcagatgcaatcgccggaatcgcatttatgatcgcagagatccgaaaagcgatggcaaaagtaccgacacatgaagaacttggaaagtctacggttacatttggacagatttccggaggatacagtccgtatgtagtatcagatcacagtatggtgacgatagatatgcgtcttgttccgccgatgaatacacaagaggcagaaaagattgttcgaaaagcattgaaattggagaaaatgcagttccgggtgtaaagggttcttataagattacaggtgacagaccaccggtggagacacacatggagtcaggtcttatgaaagctttatctgaatcagtgaaaaaagttactggaaaagatccggttgtgtcagcgttcacgggttatacagacacagcagttgtggcaggtcttttgggaaatccgaattgtatgtcttatgggccgggaaatcttgcacaggctcataaaccggatgagtatgttgaaattgcggatattgagcggtgcgttcaggtttatcgtgaactgatctgtctttatgaagatatgatatagaagttatttctgaaaaaagatactgttcaaaaggaaaaagcttagaatagcggaagatataacatatcttgagaaaaaagtcaagaaaaatataaaaaacacaagaatcatgttgacaataaaaagagctttgtgatatagtagaaaatgcgctattgtggaaaggtatgccatatagtgacagagaatactgtcgcaaggctcttttcatttttatataactggaactcgtaaaaggcagtttattgcctgcaaaaacaataaatgaggagtgaaacgtcaatggagaaaaacagaattcgtcccatcaaaaccggaaaaagcttccgcatgagctattccaggcagcaagaagtattggagatgcctaacctcattgaagttcagaaagattcctatcagtggtttcttgacaaaggactgaaagaggtattcgatgatatttccccgatcgcagattacaatggtcatctgagtctggaatttgtggattttacactctgcgaggaagatgcaaaatatacgattgatgagtgtaaagaacgtgatgcaacttatgcagcacctctgaaagtcagagtaaggctttataataaggagactgatgagattaacgagcatgagatctttatgggagatcttccgctgatgacaaagacaggtacttttgttatcaatggtgctgagcgtgttatcgtcagccagcttgtgcgttccccgggtatctattatggaatcgcacatgataagttcggtaagaaactttattcagcaactgttatcccgaaccgtggagcatggctggaatatgagactgattccaatgacgttttctatgtacgtgtagaccgtacaagaaaagtgccgatcacagttctgatccgtgcacttggagtaggtacaaatgcagagatcattgaactctttggtgaagagccaaaacttcttgcaagttttggaaaagatacttctgagaactaccaggaaggtctgttagagctctataagaagatccgtccgggcgagccgctggcagtagacagtgcagaaagcctgattacaagcatgttctttgatccaagacgttatgatcttgccaaagttggacgttataagtttaataagaagcttcttcttaagaaccgtgtatcaggacagatcctcgctgaggatgctgtaagtgcgatcacaggtgaagttgttgctgaaaagggaacaaagattactcgtgagatcgctgatatgatccagaatgcggcagtaccgtacatttgggtagagggtgaagagacttccagaaatatcaaggttctttccaatatgatggttgacctccaggctgttgttgatattgatccggccgaggttggtgtgacagagcaggtatattatccggttcttgcaggaatcattgaagaatctgcaggtgatgtagatgagatgaagagactgatcaagagagatcttcatgatctgattccgaagcacatcacaaaggaagatatttttgcatctatcaactacaacatgcatcttgagtatggcatgggaaatgatgatgatatcgaccatctgggtaacagacgtatccgtgcggttggagaacttcttcagaaccagtacagaatcggtctgtccagactggaaagagttgttcgtgagagaatgacaacacaggatcaggatggtatttcaccacagtccctgatcaatattaagcctgtaacagcagcagtgaaggaattcttcggatcttcccagctgtcacagttcatggatcagaacaacccgcttggagagctgacacataagagacgtctttccgcacttggtcctggaggtctgtcaagagatcgtgcaggatttgaggtccgcgacgttcactactctcactatggaagaatgtgtcctatcgagactcctgaaggtcctaacatcggtctgatcaactctcttgcatgttacgcaagaatcaacgagtatggatttatcgaagcaccatatcgtaaagttgacaagacagatccgatgaacccggtcgttacagatgaagttgtatatatgactgctgatgaagaggataattaccatgtagcacaggcgaatacacctcttgatgaagaaggtcatttcattaataagaacgtatccggtcgttaccttgaggaaacacaggactacgaaagaaataaatttgattacatggacgtatcacctaagatggtgttctccgtggctacagcgttgattccgttccttcagaacgacgatgctaaccgtgcgctgatgggatctaacatgcagcgtcaggcagtaccgcttcttacaacagaagctccggtagttggaacaggtatggaagttaagacagctgttgactccggtgtggctgaagttgcagagcaggctggtgtagttgaaagctctacatctacaagcattacgatcagacatgatgacggaacaaagaaaacatataaactgacaaaattccagagaagtaaccagagcaactgctacaaccagagaccgatcgttgataaaggtgaacgcgttgaggcaggacaggttatcgctgatggaccgtctacatccggtggagagatggctcttggtaagaacccattgatcggattcatgacatgggaaggttacaactacgaggatgctgttctcttaagtgagagactggttcaggatgacgtctacacatctgttcatattgaagaatatgaagcagaggcaagagatacaaagctcggaccagaagagatcacaagagacatcccaggtgttggtgatgatgcactgaaagatctggatgagagaggaatcatccgtatcggtgctgaggttcgtgccggagatatccttgtcggaaaagtaactccaaagggagagacagagctgactgctgaagagagactgcttcgtgcaatcttcggtgagaaagcacgtgaggtaagagatacatctctgaaagtacctcatggagaatatggtatcgtagtagatgccaaagtatttacaagagaaaacggagatgagctgtcacctggagtaaatcaggcagttcgtatttacatcgctcagaagagaaagatctccgttggtgataagatggccggacgacatggaaacaagggtgttgtttcccgtgtacttccagtagaagatatgccattccttccgaatggacgtcctctggatatcgtgctgaacccactgggtgtgccttcccgtatgaacatcggacaggtgctcgagattcatctgagtcttgcagcaaaagcacttggattcaacgtatcaactcctgtattcgcaggtgcgaacgagaacgatatcatggatacactggatctggcaaatgattatgtaaaccttgagtgggatgagttcgagaagaaacatggcgaagagcttcgtccggaagttctccagttcctgtctgagaacagagatcacagagaactctggaagggtgttccgctgtcaagagacggtaaggttcgtcttcgtgacggacgtacaggagagtacttcgacagcccggtaacaatcggacacatgcattatctgaaactgcatcatctggtagacgacaagatccatgctcgttctactggtccttactctctcgtaacacagcagccgctgggtggaaaagctcagttcggtggacagcgtttcggagagatggaggtatgggccctggaggcttatggtgcatcttatacactgcaggagatcctgacagtgaagtctgacgacgttgtaggacgtgtgaagacatatgaggcaattattaagggagagaatattcctgaaccaggagttcctgagtcatttaaggttcttcttaaagagctccagtcacttgctctggatgtccgcgtactgcgtgatgacaatacagaggttaagatcatggagagcgttgattacggtgagacagacctgcgtcatatcatcgaaggagacagaaagtatcgtgatgagaatgaatctttcggagatcatggattcacagagaaggagtttgtcggagaagaactggaagatgttgaactggacgaagagccggacgacagcgatcttgagaacttaagttttgatgatgattacctgggtgaggaataataaggaggagccgtttttatgccaaataacaatgaacaacaatatgaaccgttaacatttgatgcgattaagatcggcctggcttcacctgaaaaaatcctggagtggtccagaggtgaggtgacaaagccggagaccatcaactacaggactttgaagccggagaaggacggacttttctgtgagagaatcttcggaccaagcaaagactgggagtgtcactgcggtaaatacaaaaagatccgttataagggtgttgtatgtgatcgctgtggtgttgaagttacaaaggccagtgttcgtcgtgagcgtatgggacacatcgctctggcagcaccggtatcccatatctggtacttcaaaggaattccgagccgtatgggtctgatccttgatatttctccaagaacactggagagagtactttactttgcttcttatatcgtgcttgataagggagagacagatctctcttacaagcagatcctttcagaggcagagtatcaggaagcaaaggaaaaatggggaagacatgcattccgtgtaggaatgggtgctgaatccatcaaagagcttcttgagtctattgaccttgagaaagaatatgcagaacttcaggcaggactggagaatgcaacaggacagaagcgtgcgagaatcgtaaaacgtctggaagttgtagaagcattccgcgagtccggaaacagaccggagtggatgatccttacagctatcccggttatcccgccggatctgcgtcctatggtacagctggatggaggacgttttgcaacatctgacctgaatgatctgtacagaagaatcattaacagaaataaccgtctgagaagactccttgaactgggagcaccagatattatcgtaagaaacgaaaagcgtatgcttcaggaagctgttgatgcgctgatcgataacggacgtcgtggacgtccggtaacaggacctggaaacagagcactcaagtctctgtctgacatgctgaaaggtaagtccggacgtttccgtcagaacctgcttggaaaacgtgttgactattcaggacgttctgttatcgtcgttggaccagaactgaagatctatcagtgtggtctgccgaaagagatggcaatcgagctgttcaagccattcgttatgaaagagcttgtagcgaatggaacagcacacaacatcaaaaatgcaaagaaaatggtcgagagacttcagccagaggtatgggatgtgcttgaagaagtaatcaaagagcatccggttatgctgaaccgtgcccctactctgcatagacttggtatccaggcatttgagccaatccttgtagaaggtaaggcaatcaagcttcatccactggtatgtacagcttacaatgccgatttcgatggagaccagatggctgtccatgtaccgctgtcacaggaagcacaggcagagtgccgtttccttcttctttcaccaaacaacttgctgaaaccatctgatggtggtccggtagccgttccttcacaggatatggtacttggtatttactatctgactcagcttcgtcctggtgcaaagggagagggcatgttctttaagagcgtgaacgaggctattcttgcatacgagaatggatatatcacacttcactcacagattaaagtacgtgtgacaaagactcttgcaaatggagaagagaagacaggaactatcgacgcaacacttggtcgtcttttgtttaacgagatcattccacaggatcttggttttgtagaccgtgaggttgagggaaatgaacttaagatggaaattgacttccatgttggtaagaaacagctgaagcagatccttgagaaagttatcaacactcatggagctacacagacagcagaagttcttgatgatgttaaggcaatcggatacaagttctctacaagagcagctatgacagtatccatttccgatatgactgtaccaccgcagaaaccgcagatgatgcaggaagcacaggatacagtagacaagatcacaaagaactacaaacgtggtcttatcacagaggaagagcgttacaaagaagttgttgagacatggaaagcaactgatgataaactgacagaggcactgctgacaggtcttgataaatacaataacatctttatgatggcagattccggagcccgtggatctgacaagcagatcaaacagcttgcaggtatgcgtggacttatggctgatacaacaggtcgtacgatcgagttgcctatcaagtcaaacttccgtgaaggtcttgacgtactggaatacttcatgtctgcccatggagctcgaaaaggaatggccgatacagctcttcgtacagccgattccggttacctgacaagacgtcttgtagacgtatctcaggagcttatcattcacgatgcagattgtgcaaaaccgggtcagccgattccgggaatgtatgtatctgcattcatggatggaaatgaagagattgagagccttcaggatcgtatcacaggaagatttgctgctgaggatcttaaagataaagacggaaacgtccttgtaaaagcaaaccatatgattacacctcgtcgtgcagagcgcgtgatgaagaaaggtgttgacgagaacggaaatcctcttgagcaggttaagatccgtacaattcttacatgtaaatgtaagaacggtgtatgctccaaatgttatggtgcgaacatggcaacaggtgaggcagttcaggttggtgaggcagtcggaatcatggccgctcagtcaatcggagaaccaggtacacagcttactatgcgtacattccataatggtggagttgccggtgacgatatcacacagggtcttcctcgtgtcgaggagcttttcgaggcaagaagacctaagggacttgccatcatcacagagatcgcaggacgtgcaacactcagtgatacaaagaagaaacgtgaggttatcgttacaaacgaagagacaggagaatccaaatcctatcttattccttacggatcacgtatcaaagtacaggacggcgttatgcttgaagccggagatgagcttacagaaggcagcgtaaatccacatgatatcctgaaaatcaaaggacttcgtgcaacacaggattatatgctccaggaagtacagcgtgtataccgtctccagggtgttgagatcaacgataagcatatcgaggttatcgttcgtcagatgctgaagaagatcagaatcgaagagaagggtgatacagagttcctgcctggaacaatggtagacgttcttgacttcgaagaagtaaacgagcagcttgttgcagaaggaaaagagccggctaccggagaacagatcatgcttggtatcacaaaggcttctctggcaacagaatccttcctgtcagccgcttccttccaggagacaacaaaggttctgacagaagcagctatcaagggtaaagttgaccatctagttggtctgaaagagaacgttatcatcggtaaacatattcctgccggaacaggtatgaagaagtaccgtgatgtaaaactcaacacagatattaagatggaagatgaactggatcttgaagatgatctgaatctggatgaagattttgacatggacgaaaatgttgatctgacagatgagttcgtagaagagaacacagaagatgctgcagaaacatccgtagaagaaccagcaacagaagaataaaacattatcgtagaaatcattttactgatatacggacgaaaacagaaaatattattttagaaagtcgattgttagaagaatgatacaggaacgccgactcagggttacgcatactgttcatactaggaaaaacaacagactgctaaaaacaaagaaaggattgacaaactcgctgtcgctcagacagctgtcaatcctttctttaacgcaatctattgcttttcaagtatgagccaagcatgctacacattcgtcttcgtccctgtaccatccttctaacatgaaacttctcgaagttcatattttctgttttctgtttattgaaaaagatagacttctatgctaaattttattaaatacaaacacgtttgagatagggatatcattctatagaacatccggttcctttccgtctcaagtagagttcttctttcgagaaagtagaaatcagatagcgacggaaaacttaccgatagacagacattgagggattggttcaggtgactgttctgtgtgcttggaaagacttaaaaaacgaaagattacgttaaagcaatgcgaggctactgtctgaagcggtagcgagtttgccgagcattgcattgtttttagtaatcgttcgtttttcttagtctttcctgtatacagaacccggagcctgaagcaatccctcaatgtctgtctattagaataaactttataagtgctatctgatttcgtccaattttcgaagaagaatctctacgataaatttatatttagatagtctctccatttttatatttctgaagtacattctggatacgctcattcggactgagaatctcgctcagtgatccgtcatgattcagagtatcaatgatcagagcaatgtacttgctcatgtcacagttgatataatatggttttgaaagaagatttggtgtctgataaatcaggtttgttgtcaggataccgttgataataccttcttcataagctttgtcaaatttttccattccgtttgtgaacagaccaaatgtagcagcagcaaagatacggtttgctttacgtctctttaactctgtagcaacttcaatgatactgtctccggaagaaatcatatcatcaataataattacatctttgccctctacagagcttccgaggaattcatgagcaacgatagggttacgtccgtttacaatctgagtataatcacgacgtttgtagaacatacccatatctaaaccaagaacgttggcaagatatacagcacggtttgtaccaccttcatccggactgattgccatcatatgctcactgtcaatctgcaggtcctttacattgcgaagaagacctttaatgaactggtaagttggtgagattgtctcaaatccactcagcggaattgcatttgatacacgtgggtcatgtgcatcaaaagtaataatgttgtctacacccatgcgaacaagctcctgaagcgcaagcgcgcagtcaagagattcacgggaagttctcttatgctgacggctttcataaaggaatggcataataacgttaatacgacgtcccttaccacctacagcagcaatgattctctttaagttctggaaatggtcatccggtgacatatggtttgtgtttcctgtcagagagtaagtaacattataattacatacatcaaccatcaggtaaatatcttttcctcgtacggattctccaaggatacctttggcttcaccagaaccaaaacgcggtacactggcattgatcagataattatctttctcatatcccgagaaagcaacgtcattcttgtgctcgtgagcactttcacgacgccatttaacaaggtaatcatttaccttatttccaagctcttcgcagccaagtaaaggaatgattccaaggcttcctactggtatgttctccaagatacgttctgaacgacttaacatgagtcataatcctcctaatgttctaacttctttttaatacgtatatcatcaccgactattttcaacagactatatctgcttgtaattctggagaaagaacgctcagtataaagatcagcgagtgactccaaagaaaggtttgttgaaataatcgttgatttcctatgcagtagcctttcgttgatgcaagtaaaaaactgtgatgcaataaaggcatttgtgtactctgtaccaagatcatcaataataagcagatcacagtcaaaaatgtattcacacatgttatgtgcatcaatgtcatttttgtcaaatgcattcttggcaagagtattaaaaagctgtggagcagaaaaatacaaaacagaatattctctgttcataatctcttttgcgatacaggtggagagaaaggttttcccaacaccgacatctccatagaaaaagagattgttgaactctgtcccaaagctgtcgataaaatgatggcagatgcgtaaagtgtcttccatcatggaacgagaagaacgtcccgttttcttatcgtaatgtgaaaccggataatagtcaagtctgaaattgctaaaatctgtttctacagggaattttttaatatttgactggtcataaagcaatccaatgattgcttttttgaaacaatggcatttttgattaccaatatatccggtgtctttacaatccggacagtcgtaaaccggctccagataatcttctgggaagccggctgatttgagcagatgaatcttacgattacgtaattctgcaagatctttctttaaagcatcaactgcactggtatctccatcaagtagtttctttccatactgaatagacagtgaggcaatggagtcatcaagtgctttgaagtcagggagctttttatagacttcttcataccgagccacctgaatgtcatggctatgtaattgtttttgctcatatttacgcatgattgcatggtactgtgaattttttaatcccatgaaaagactccttttaatttctctttaaaataattgaccttctaaatcattgctttttcgttagttgctcttcagaagctgctcttctagagaatccatgtcgtaggaacgtctctcaaaattattcagatttcttgtgacattctttggttttgtgacaggacttctatgtaaggaacgttctttctggaattcatgatccaaagcattgatatcagtcagatgatgaatattgcattcataccattttgtgagaatggagtcagcatattcaaaacttggctgatgtgtggcagagattgttctgcggcaggcctcctgaatgatgtcagcggaaaagccataagtatcagcccatttattaatatattccagttcagaagaggcaggtcctctgttcttaataccgaatgcattcaaaaccgtgtagcagttacggctgtatgcagcagcctgttctttagcctgtgatacggtttcaactccgttctctacccaggaaatggcaaccttctggatgtaatgcatactcttatgtccgttctctacacaggattcaatcagatattcaatcagatcagcagacatatgcagtgtatcatagaaataagtaattgtgtcgacatccgtatgcgtcagtgtcttgccaaggtactgttccgtgatgaacaggagagacttgatctccttctgggcacggaatgtatcaagaggaaccgcattggaaaccggagtctggatattgctttctaccggtgcagaaacagcttctgatcggaactctgttaccggagctacaggagtctgagcagggattgaatcctgaggatagcttgatgtacagccggaaaaatcagttgtatctccacaagtattctcttcctcatcgcgaagaaattcaacggcagtgattccaccgtccggtccgtgtccaagtctgagaagaccgacagattcccagtaacggaaagcgcgaagaacatcattctctgtattattcagataatctgcgatcatggagatgctcagagaagatgcagcatcctcaacatgacggagaagaaaaaggtatacttttacaaactctccgttcgcattcgccatataatgatctacaaagctgttcggcagcattgtcatattcatctgaaaattattctttaaaaccaaagtcttcataacttatcctgctttctctatgtattaaccaattgccacttgctctgtctgatgaggggcaacctgaaatctatatcttcttctctttagtgtgaatattataacatcatatgagaatcttaaaaagaattttcgagtgggtaactaggacttttttgtagataactatgtggagaaaatgtggataaagtgtggaaaagttcacatgcatgtggatatctatgtgaacttttccacagaatagtttagcaaaattattgggaaagccttattttaaaaggtcttcgccgatcttaacaacatctccggctcccattgtaatcaggaggtctccggatttgcagttttccttaaggaaatcttctatttgttcaaaacttggaaggtaatgtgcatctgttccaagtttgcgcgcttcctctgcaagaccggcagaagaaactcccagagtatctgtctcacgggctgcatagatatctgcaagaaccagatgatccgtgtgagaaagagcctctgcaaattcatggaagaaagcttttgttctcgtataagtatgtggctggaagacacaccatacctgattgtgtgggtagtgctgtgcagccttcagagtagcggcaatctctgtcggatgatgtgcataatcatcgacaacagttacaccgttaaatgttcccttgtattcgaaacgacggtctgttccgctgaaagaaagaattccttttttaattgtttccattggaatctgaagcagttcagcagtagcaatagatgcaagtgcatttgacacattatgatcacctgttacagaaagctggatatggtcaaccgcttttctgttctttataagatcaaatgcaacaagccctttttcatcataagtgatgttagcagcactgtagtcaagcatatcagaagaaccataagtgatcacattacagtcaagaccttcataaatctcctgataattgtcgatatcaccattgatgatcaaagttccatcagaaggaagaagtgccgcaaactgatggaaagaatgtctgatgtcttcaagatctttgaagaagtccagatgatcttcctcaatattgagaatgacactgatcttcggataaaaatgaagaaaactgtttgtatactcacaggcttctgtgataaaagtctcggattttccaacgcggatgttaccaccgatcgccttgagaataccaccgacagaaattgtaggatccagatcggctgcaagtaaaatatgagagatcatggatgtagtagtagtttttccatgagtaccggatacagcgatcggtgtcttgtaatttttcatcagctgtccaagcagctctgcgcgtgtaagcattggaattttgcgggcaacagcttccataagctccggattagctttattgatcgcagcagtgtatacaacacagtcaattccgtcagaaatgttctcggcacactgtccgtaatggatgatggcaccttcagactccagcttctttgtgagtggagactcctttgaatctgaaccggatacagtaaatccttcttccagaagaatctcagcaagaccgctcatactgattccgccaattccaataaaatgaatatgtatcggcttttcaaaattgattttatacattgagatacgccctttctttaatagattttataaaataacttgtgattttagtcataaatcttctatatcgtttatattatactatatatcgaaaaaaaagaaagaagatctttttggtagaaattgataaaaaggagaaaaaagtatgaaaaaaattgtaaaatatgtttgttatttctaaatatatggtataatgattttagcttacttgaaatgaggtgacgtaatgtataagaaggaaatgattgccatgctgctggcgggtggacagggcagtcgacttggagtacttacatcaaaagttgcaaaaccagcagttgcttttggtggaaagtaccgtattattgatttcccgcttagcaactgtattaactcgggaatcgatacggttggtgtactgacacagtatcagccgcttcgcctgaatacacatattggaattggaattccgtgggatctggaccgcaacgttggaggggtatcagttctcccaccatatgagaagagtacaaacagtgagtggtatacaggaacagcgaatgccatttatcagaatctgaattacatagagacttataatccggactatgtactgattctttcaggagatcatatttataagatggattatgaagtgatgcttgatttccacaaggcaaacgatgctgatgtgacaattgcagcaatgccggtgccgatggaagaagcaagccgtttcggaattgtagtgacagatcaggacagcaggatcaaagaattcgaagagaagcctgagaagccaagcagtaatctggcatcaatgggaatctatatctttagctggccggttcttaaagaggcacttatcaagctgaaagaccagccaaactgtgatttcggaaaacacattattccatattgtcatgaaaaaggggacaggctgtttgcatatgagtacaacggatactggaaagatgttggaacactcagctcttattgggaagcgaatatggaactgattgatatcattccggagtttaatctttatgaagaattctggaagatctatacgaacagtgcgaatcttcctccacagtatattgcagagaatgctgttgtagacagatgtatcattgcaaacggaacagaaatttacggagaagtccacagttctgttcttggaggaagtgttactgtaggaaagggcagcgtagtccgtgactcaattattatgcagggagttacaatcggagaaaactgcgtgattgagaaagcaatcatagcagaagacacggtaattggaaatgatgtttctatcggaatcgggagtgaagttccgaataagatgaagccgaatatttacagcggtggactggctacgatcggagagaattcagtgattccgggaggagtacagattggaaagaataccgccatcagtggagtgacatcatccgaggattacatagatggagtacttgcaagcggtgagacattgataaaggcaggtgacagagtatgagagcagtaggaattattttagccggcggtaacagcagaaagatgaaagagctgacttcaagacgtgcggcagcagcaatgccggttgccggaagctatcgcgcaattgactttacattaagtaatatgacaaactctcatatccagaaagttgctgtgctgacacagtacaatgcccgttctttgaatgagcatctgaattcctccaaatggtgggatttcggaagaaaacagggtggattatatgtattcacacctacgatcacagatgataatggttactggtacagaggaacagcagatgcgatttatcagaatctggatttcctgagaagatgtcatgaaccttatgtaatcattacatcaggtgatgcagtctataagatggattataataaagtgctggaatatcatattgcgaagaaagcagatatcactgttgtttgtaaagaacttggagcaggagaagatgcgacaagattcggaaccgttaagatgaatgaatcttgcagaatcgaagaatttgaagaaaaaccgatgattgcaagatcacagacaatctctacaggaatttatgtgatccgcagaagactgctgatcgatcttgtagaacaatgtgcggaagaagagagacatgatttcgtaaatgatatcctgatccgttataagaatgtaaagaagatttatggttataagattgaaagctattggaataatatttcaacagtagatgcatattacaagacgaatatggatttcctgaaaccggaagtgagaaaatatttcttcaaggatctgccaagtgtatattctaaggtgagtgatcagccaccggcaaaatataatccgggtgcgatcgtgaagaacagtctggttggaagcggaagtattattaatggaacgatagagaactcagttattttcaagaaagtatttgttggaaataattgcgtgatcaagaactctatcatattgaatgatgtatatcttggagataatacatacattgagaactgtattgtagagagcagggatacgatccgtgcgaatacaagacatgtaggggaagacggaattaaaatagttattgaaaagaatgaaagatatgcattataagccaagataagcacaaaaaccctgaaaaagggtgtttatattccgtgtaatgcaaaagagaaaggggaactgtaatatgcagattacagatgtacgtgtacgtaaagttacgaaagagggaaagttaaaagcagtagtatctatcacaattgatgaggagtttgttgttcatgatatcaaagtgatcgaaggtgaaaaggggcttttcattgcaatgccaagtaaaaaagcattagatggagagtatcgtgatatcgcacatccgatcaattcaggaacaagagaacgaattcagtcaacaattcttacaagatatcagcaggcacttgaagaagagccggagccgttggttgttgacgagatgtagggtattgtggtgctgctcttatcttggataaatgacaagtaaaggcagggctaatacaatagataggaaacaggcgaaaggaaaagtgcaatgattgcccgatcactgcacttttcctttttgtcttataaatgaaaaaccattttttcaccggttgtcggatgtgtgaattccagccggcaggcacaaagcattaactgtcgtgaagtgcatgcggcagtgccatatttccgatccccgatcagagggtgtccggcatgtgcaaactgcacgcgaatctgatgatgacgcccggtatccagatgaatttccagttgggaaaaaggttcaccagaaggaagtgtacctgtatggattactctataatgaagtcgtgcatactttgcatcaggcacattttcttcacagacacgggaggtgttggttcgtccgtcttttacaagatagtcttccagagttccttcgttgtgttcgaaaatgcctaaagcctgtgcacggtaatatttcccaaaaccagatgtggtaagctggcgggaaagttcctttgcggcagcaggtgtttttgcaaaaacaagaagtccttctaccggttggtccagccgatggatgacagcaagataaggttcgcgtgaagcggtttttttagcagtattttttatcagatgattttttaaaatactgaccatatcttttgtgccaatgcggttgctctgggtaggaactccagcaggtttatgacagacgataatatccttgtcctcatatattatttcaggggtaagtgatgaaatcatagttgtatccttctttcttgacaatcgctaaagttgcgtctaaactgagaattaataatgttataatgatacatgatgcaaacgaatcaggtcaagcttttaaggagaacatcaatgaataatgactgggaacattttggagaagagataaagcagacaatacaggatgcaattgatacaaaggattacagcagattgaaccagatggtgtctgatacggtgaaccatgcgatggactgcgtctcggcagggataaaaaacggtggctggtacagagatccgaagaccggacagccattatatggaaataaaaagaataccggaagcagatcaggtgcagaaaaccagaggtatcgtccgaatcagggaccgaagatgccggaaatgagaaattatagtcagaattgtccggtaccggtgagtccaagatatctcaaaggaacttcggtaaagatcggcggaacttttctggcagcgacaggagctgtatttggattgacttctgttattttccttatcatcactttgattggaagtgtgatcacagtgtttgatgtagtcagtggtctgattattggaatttttgcagttgcttttatatcttttgcagtgatgacttatgtaggagtagatatggtacgtacggtgggaaggtttcgccaatatgtatctgttctgagagaacgggaattttgtgatattaaggaaattgcttctgcgacaggacgagatgccagaaaagttctgaaagatgtgaaaaaaatgattacaaaaggctggttctgtcagggacatctggatgagaaagaatcctgcctgatggtcagtgaacaggcatggaatcagtatacagctcttatggaagacatgaaacagcgcaaggcagaagagcaggctgctcagaaaaagatgcaggaagagtatgacagcctttcaccggaagtacagaagattgtacaggcaggagatgaatatgtgagaaggatcaaggcagcgaatgacgcaattccgggagaagtgatttcggcaaagatttcccgcatggaactgctcgtggatcgtatttttgaccgcgtggagcagaatccggattctgtgaatgatatgcgaagaatgatggattattatcttccgacaacgatgaaacttcttgaagcgtatgaagagctggatgcacagccggtacagggagaaaatatcatttcttccaagaaagagattgaagatacgatagatacattgaatcttgcatttgagaaattactggacagtctgttccaggatacagcatgggatgtatcttcagatatttcagtgcttcatacaatgcttgctcaggaaggtctgacagaagacgggctgaaaaaataatgatttcccaaacagataatgaatcaaaacagttacaaacagaagtggaggattactatgagtgatgaattcaaggatgtaagcacagtgccaacactgacactgaaaccgtttcaggaggaagaaaaaaagaaaccggtggtgcagccggaagaaccgaagctggacgatacgattctgacagaagaagaacgcaggatggtagatgcatttgcacagcagatcgatctgacgaattcttctatgattcttcagtatggcgcgggcacacagaaaaagatggcagatttctcagaaagtgctttggaaaatgtgaagtcaaaggatctgggagaagttggcacactgcttacgaatgttgtaactgaactgaagagctttgatgaagaagagagcaaaggatttcttggaatatttaagaaagcatcgaataaagttgaatctatgaaagcaaagtattcgaaagccgaagaaaatgtgaatcagatcgtgaaagcactggataaccatcaggtgcagctgctgaaagatgttgcgatacttgataaaatgtatgatctgaatcttacttattttaaagagctttctatgtacattcttgcaggaaagaaaaaactggaagaagtaagaagcacacagcttgctgaattgatgagcaaagctcaggtaagcggtctcccggaagatgcgcaggcagcaaaagatctggattcgatgtgcaaccgttttgaaaagaagttacatgatcttgaactgacgagaatgatctccatccagaccgcaccacagatccgtctggttcagaataatgatacacagatggtagagaagatccagtctacaattgtgaatacgatcccgttgtggaagagtcagatgcttcttgcacttggagtagaacattcttcacaggcggcggcagcacagagacaggtgacggatatgacaaatgaactgttgaagaagaatgcggagacattaaaaatgtccacaattgagactgcaaaagagtctgaaagaggaattgcagatctcgagacattgaaagcaacaaatgaatcactgatctctacattggatgaagtgatgaacattcagagagaaggaagagaaaaacgccgggaagcggaggcggaacttcgcaatatggaaaatgaattgaaagcaaagcttctggaaatcagaggataaagctttttggcttgacagcgggtgttttatcagttagaatttcatttgataactgacgttgaacgggaatagtagatacgcagcatgcttcagagagaaggcggcaggtgagagcctttgcattacggtatggaaccggcccgggagtccctgtatgaaagtacagcgtaggtcctgcgttaaaggagaagaaagtgaatgcagatacagagatcatttgtgttggttttgattatagaatggatgtattgcattaattagggtggtaccgccggagatattcggtccctatcgtggggatgcgatatcccggcgattttttatatgttaggaaaatatttcctgataaaagcaaactgctgtcaggggacagcaatgcaaaaaaacaaaaaggagaagaacaatggcaaagaaattagtacagaatatcactgccagagaagaagattttgctcagtggtatacagacgttgtgcgtgaagcaaaactatgtgattattcaggtgttaaaggatgtatgaactaccttccgaacggatatgctctgtgggagaatattcagaagaacctggatgcacgtttcaaagagacaggagtagagaatgtataccttccggttatgatcccggaaagccttcttcagaaagaaaaggatcatatcgaaggatttgcaccggaagttgcatgggtaacacatggtggactggaagaacttcaggaaagattctgtatccgtcctacatctgagacactgttctgtgatgtctggagcaagacagttcagtcttaccgtgatcttcctaaggtgtggaatcagtggtgttccgttcttcgctgggagaagacaacaagaccattccttcgttccagagagttcctgtggcaggaaggacatacaatccatgcaacatacgaagaagcagaagagcgtacaaaacagatgtggagagtctacagagactttgcacaggatgttcttgcaatcccggtagtttccggacgtaagacagagagcgagaaattcgcaggagcacaggatacttatacaatcgaagcactgatgcatgatggaaaagcactgcagtcagcaacaagtcacttctttggaagttcattcccgagtgcgtttggtattcagtattcagataagaataacgaacttcatgaagtatacgagacatcctggggattgtccacaagaattatcggtgcgctgatcatggtacatggagatgacagtggactcgttattccaccgagaatcgcaccggtgcagacaatgattattccgatcgctcagcataaagaaggtgttcttgataaggcaaatgaacttgttgatacactgaaggcagcaggatacaaagtgaaaatcgacgattctgacaaagcacctggatggaagttcagcggacaggagatccttggaatcccgacacgtatcgagatcggaccgaaagacatcgagaataatcaggcagttatcgtacgccgtgatacaagagagaagattgttgtttctctggatgagcttacaacaaaacttgccgaagttcttgagacaatgcagaacgatatgttcgaaagagcaaaagcattccttgattctcatatcaatgaagcaacaacaatggatgagatgaatgagaagttcaatgagaaccttggattcatcaaagcaatgtggtgtggagacgaagcctgtgaagatgagatcaaagctcagacaggcggagctacatcaagatgtattccggaagaggaagaacatctttcagatgtatgtgtatgctgcggaaaaccggcgaagcatatggtatactggggcaaagcgtactaatttatttcgttgaaaataaagaagagatttactttcatagttgctagaaaaaagaatttgatttaataacaaataacagatggtttcttaagaaaaaaagagagtgccatctgttatttttgtatgaaaaataatatggaaaatgcgaaaaaagccttgactttcggcgctaaacgtaataaactaaacaagcgtgtggaaaaagacattgttcttttgatgcgcaaatcaggataacgaattgattatccgcagccccttgaggcataagcccaaggtaacgaataattcataggaggtgaaaagaatgccaacatttaaccagttagttagaaaaggacgtcagacttctgagaagaaatctacagcaccggcacttcagaaaggatataactccctgaagaaacgtgcaactgatgcatctgcaccacagaagagaggtgtatgtacagcagttaagacagctacacctaagaagcctaactcagctctgagaaagatcgccagagttcgtctgtcaaacggaatcgaagtaacaagctacattccaggtgaaggacacaaccttcaggagcatagcgttgttatgatccgtggaggaagagttaaggacctgccaggtacaagataccacattatccgtggaacacttgatacagcaggtgttgctaagagaagacaggctcgttctaaatacggtgctaagagaccgaaagacgctaaataagaagtcgcggattgcagtatagtattttagataagtgtaactaatagttaaatcgtatcacaaacagaactatgattagtcgtaggttgcggatgctatatagatttcgcggctgcgagcacatggaatgtgatctcatagaaagacacatgtgagtaccgatgaattaatcccggaaaaaccggaaaatatgattaaggagggaaggaccgtgccacgtaaaggacatactcagaagagagatgtattagcggatccaatatacaacaataaagttgttaccaaacttatcaacaacatcatgcttgatggtaagaaaggcgtagcacagaagattgtatacggagcatttgaaagagtagaagctaaggctgagaagccggctattgaagtgtttgaagaggctatgaataacatgatgccagttcttgaagttaaagcaagacgtatcggtggagcaacataccaggtaccgatcgaggttagagctgacagaagacaggcactcgcacttcgctggttaactatgtattcacgtcagagaggcgagaagacacaggaagaaagactggcaaatgaaattcttgatgcagctaacaacacaggtggagctgtaaagagaaaagaagatatgcacaagatggcagaagcaaacaaggcgtttgctcactatcgtttctaattattttaggaggaaaaaatcttggctggaagagaatatccattagagagaaccagaaatatcggtattatggctcatattgatgctggtaagactacactgacagagcgtattctttactataccggtgttaactataagattggtgatactcacgaaggtactgctacaatggactggatggaacaggagcaggaaagaggtatcacaattacttcagccgctacaacatgtcactggacattggaagagaagacaaaagtgaaaccgggcgctttagagcaccgtatcaatatcattgatactccgggacacgttgacttcactgtagaggttgagcgttcactccgtgtacttgatggagctgtcggcgtattctgtgctaagggtggtgttgagccgcagtcagaaaacgtatggcgtcaggcagacacatacaatgtaccacgtatggcattcatcaataagatggacatccttggtgctgatttctacaatgctgtagatcagatcaagacaagacttggaaagaacgctatttgtcttcagcttccaatcggaaaagaagacgaattcaaaggaatcatcgatctgttcgagatgcaggcctacatctacaatgatgagaagggtgaagacatcactgtaacagatattccggaagagatgcaggatgaagctgagctttatcacacagaactcgtagagaaaatctgtgagctggacgatgaccttatgatggaataccttgagggtgaagaaccttctatcgatgcaatgaaagtagcactgagaaaagctacatgtgagtgtacagctgttccggtatgctgcggtactgcatacagaaacaaaggtgttcagaaactccttgatgcaatcatcgagtttatgccggctccaacagacatcccggcaatcgagggtgttgatgaagacggaaacgaagtagtaagacactcttctgatgaagagccgttctctgctctcgtatttaagatcatgacagacccattcgtaggtaagcttgcttacttccgtgtgtattcaggtgttatgaactccggttcttatgtactgaatgctactaaaaataaaaaagagcgtgttggacgtatccttcagatgcatgccaacaagcgtgaagagctggataaagtatattcaggagatattgctgcagcaatcggattcaagttctctacaacaggagatacaatctgtgacgatcagcatccagtaattcttgagtccatggaattcccagagccagttatcgagctcgctatcgagcctaagacaaaggcttcacagggaaaacttggagagtctcttgcaaaacttgcagaagaagacccgacattccgtgctcatacagataaagaaactggacagacaatcatcgctggtatgggtgagcttcatcttgaaatcatcgttgacagacttcttcgtgagttcaaggtagaggctaacgtaggtgcacctcaggttgcttacaaagagtccatcacaaagccagttgatattgacagcaagtatgcgaaacagtctggtggacgtggacagtacggacactgtaaagttaaattcgagccaatggatgtcaacggtgaggagacatacaagttcgagtctactgtagttggaggagctattccgaaggaatacatcccggcagtaggtgaaggtattgaagaagctatgaagtctggtatccttggaggattccctgtagttggtgtttacgctaacgtatacgacggatcttaccatgaagtcgattccagtgagatggcattccacatcgctggttcccttgcattcaaggatgctatgaaacagggcgcacctgtacttcttgagcctatcatgaaggtagaggttacaatgcctgaagaatatatgggagatatcatcggagacctgaactcacgtcgtggacgtattgaaggtatggatgatctcggtggcggaaagatcgtacgtgcgtacgttcctctgtcagaaatgtttggatactctacagatcttcgttccagaacacagggacgtggtaactactcaatgttctttgagaaatatgagccagtaccgaagtctgtacaggagaaagtattatccaacaaaaatgcctaaaatatcataaaaggcttgaaaatcggctaagtttgaaatataatcaaacttagccaggtttaaaatagaaaaccaaaacaaggttgccccattgagggttatatttttaaggaggatattcaaaatggcaaaggctaaatttgaaagaacaaaaccgcattgtaatatcggtactatcggacacgttgaccatggtaaaacaactcttacagctgctatcacaaaagtactttctcacagagtagaaggtaacgcatctgtagatttcgagaacatcgataaggctccagaagaaagagagcgtggaatcacaatctctacagcacacgttgagtatgagacagctaaccgtcactacgcacacgttgactgcccaggacatgctgactacgttaagaacatgatcacaggagcagctcagatggacggagctatccttgttgtagctgcaacagacggagttatggctcagactaaagagcatattcttctgtcccgtcaggttaacgtaccatacatcgttgtattcatgaacaaatgtgacatggtagacgacgaagagcttcttgaactcgtagagatggagatccgtgaagtacttaacgagtatgacttcccaggagatgacacaccgatcatccagggatcagctcttaaggctcttgaagatccagacggagagtggggagacaagatcatggaacttatggacgctgttgatacatggatcccaacaccagagcgtgctacagacaagccattccttatgccagtagaggacgtattctctatcacaggacgtggaacagttgcaactggtagagtagagcgtggaacacttcacgtatctgacgaagttgaaatcatcggtatccacgaggacgttaagaagactgttgtaacaggaatcgagatgttccgtaagcttcttgatgaggctcaggctggagataacatcggagcacttcttcgtggtattcagagaacagagatcgaaagaggacaggttcttatcaaaccaggtacagtaagctgccataagaaattcacatgccaggtttacgtactgacaaaagacgagggtggacgtcatactccattcttcaacaactaccgtccacagttctacttcagaacaacagacgtaacaggtgtttgcgagcttccagaaggaatcgagatgtgtatgcctggagataacgtagagatgacagttgaactgatccatccagtagctatggaggaaggtcttcgtttcgctatccgtgaaggtggacgtacagtaggatcaggtacagttgcttcaatcatcgagtaattaatatctagatagatttaatatcgatacttaaaatgaaatatgcccgcaggacctcggttctgcgggcttttctattagtgcgcaaatatacaaaaaagtattatcttaaatatgttgtgccttgaaaaatcctattgaaactgaccgcatttctcagtataatatcactgtattaggaagtactttgaaaaacgtctgttagggaagattctctaacggacgtttttggggataattaaaatcatatggctaatgggaggaatttatggataaggcatatttaaagcgggcaagtaccgttgcaaaggtcatttttggaaatgttttctatgcttttgtaatcaaactttttcttttaccggggaatctgatgacaggaggaacaaccggtattggtctggtagtgaagcattttacgggagcatcaatttctggatttgtcttagcatttaatattgtgatgctgatagttggagtgatttttcttggtaagaaatttgcactgacgacaattctcagttctttcacatatccaattgcattggaagcggccaatcatatttttggggatctggtgatcacggataatccaatgctgaatacgatttttgccggacttggaatcgggattggacttggtattgtaattcgaacaggagcttctaccggaggtatggatattccaccgttgattttgaataagtattttcgaattccggtgtcagtgagtctgaatgtatttgatatattgattctgttaccgcagattctatataatcctccggaacgcgttttatacggaattttactggtaatgatctacacgacagtgctggacaaagtgttagtgatgggaaataccaagacggaagtgaagattatcagcaaacaggtggaagaagtacgtcaggcaattcttgcgcaggtagacagaggcgtgacgatgctgtatggggaaggcggttacaaacaagaacaaaagcagattgtattgagtattgtgtctaatcgagaacttccacaagttgagaaattgatcagacagattgacccggaggcatttatgatcatcagcagagttacagaggtacgaggaagaggcttctctttgagtaaacattacggagaagaggaaggctgatgatgctgcaaaaacagtactgtagattaaacatttatagaattaaggaagaacagttgtatgctaaataaaaaagatttcttaaaatacgcatcaaaattagcctttccgatcatgattcaaaatttgattggaacattggtaaatattgccgatacggtaatgcttggatacgtaagccagacggcgatgtcagcttcatcacttgcgaaccagtatacgtttattctgttctgcttatattacggtatggctacaggaacttcggttctgtgtgcccagtactggggaaaaggggataaaaagacagtagaaaggattctcggtcttgcggaacggatttcactgatcgtctcgcttatatttttcgttatttcctttactatgccggttacggttatgaagattttcacaaatagtccggatacgattgctgccggaagtgagtatttgaaggtgatttcattttcatttatgtttatggggttctcgcaggtttttatgagcgctcttcgaagtattggaaaaataatgctgccttctattacgtacattgtttctctttgtgtcaatgtactttgtaatgccacatttatctttggtctgtttggatttccaaagcttggcgttacaggtgttgcacttggtactgtgattgccagaattacagaggtattaatttgtctcatctattcattaaacagttcagatgtcagattccggataaaatatttctttgcgaaatcaggtattttgtttcatgactttatgaaaattgccactccagccgtggtaaatgatgttgtctggagttttgccacttcagcatttgcagcaattcttgggcatatcggagatgacatggttgccgcaaatgcggttgctgttatggtggtaaatattggtgctattgcctgccgaggttttgccaacgctactactatcattatcagccaggagttagggaaagatcaaattgatacagccggagaatacgggaaacggatgcttaggataacacttgctgtaagcctgatcggatgcgttattattctggcgattcgtcctctgatactggacttctatcgggataaattgaccgagactgccctttcttatcttagcatttttataattatgacaacctggcgtcttgtgggagaagggattaatacctgccttatatgcggttgtttcagaggtggcggagattccagatttggaatgatcgtagattccatatttatgtggcttgttgcagttccggcaactttccttgcagcatatgtttttaaattaccgcctgtctgggtttactttgtaatgactttagatgagttcgagaaaatgccagtggtatttattcactatttcagaaagaaatggcttacaaatattaccagagattttgattgaggagaagtatgatcatgtcaaaagatgaatatctaattacagatgcgcccctgaaagcgttaactgtttttgcaatgcctatgatcttaggcagtttttttcagcagatatataatatggctgattcgatcattgtcggtcagtttgttggttcttcggcacttgcggctgtcggtgcctgtgctgcacttacgaatgttttcatttgtgtagctctgggcgccggtgtaggcgcaggtgtactcgtaagccgttattttggagccagagattatggtaaaatgaaaacaattgtgtcgacatcgctgatcagctttttagtcctgagcatactacttggaatctttggcttttgcttttcacattcaatgatgagcttattacaaacacctgcggatatactggatgaagcagtactgtatctgcgggtttattttgtgggattcccatttctgtttatgtacaacatcctctcaacgatgtttacttccatcggtgaatccagaattccattggttcttctgattttttcatctgtattaaatatttttatggatctttggatggtagccggacttggtctcggcgtatttggtgcagctctggcaacgcttattgcacagggaatttccgcagtcttttcatttctgattttcctttatagaatgagacggtataaatgtcagtttgaatggtttgacggacaggagttatattcgatgcttcaaattgccataccgtcagttctccagcagtctacagtgtcgatcggtatgatgatcgtacaggcagttgtaaatccatttggtacacaggcactcgcaggttactcagcaacgatgcgagtggaaaatgttttttcactgatttttgtatccatcggcaatgcgatttcgccgtatatatcccagaatcttggtgcaaagaaaatcgaacggctcaaaaaaggctatcatgcggcactggtgttggatctatgtttcgcagtccttgcttttctggtcattgaatcactgcacaatcagatttcttccttattccttggaaaagatggaacagctttagcgtatcaggtatccggtgattatatgagatggctggggtattttttcatcttcatgggtattaagatggcaaccgatggtgttcttcgcggacttgggatcatgcgtccgtttctcattgcgaatatggtaaatcttgcgatccgtttgtctgtcgctttgatttgtgcaccgcggttcggaattgcatttgtctggcttgcagtaccggccggatggcttgcaaacttcctgatttcctatgcagcactcagaaaatcatggccgaatgaggaagataaaggagcaatatcatgcagaaaatactgattgtagaagacgatacaaatattaataacttgcttcaggaggcattatccaaagaaggctattcctgtgagcaggcattttccgggaccgaagcaaagctgcttctaaatatgcaggatcatgattacgtacttgttctgctggatctgatgctgcccggaattccaggtgaggcagttctggaggaaatacggaaaaagggaaatcttccggttattgtgttgactgcaaaagacagcctggatgaaaaggtagaggttttaacgagcggagcggatgattatataacgaaaccatttgaaatcagggaagtgctggcaagagttcaggtacagctccgccataaagaagaaaaggaagcagaggaacagcatacgctttcatttaaagatatggtattaaacagaaatacatttcaggttgaaattgctggaaagatacttccgaagatcacaaaacaggagtttgcgattttagaattactgctcagaaatccgaaacaggttttcagtaaagaggatattttcgaatatgcatgggacgagccttatatgggtgagacaaagacattggacgttcatatcagcaatatccgcaagaagatcaaacaagtgacttcggaggaatacattgagacagtatggggaataggttatcgtcttcatgcgtaatctttactctttttttactatttatttgcgtttgattaggattcatcttttatgataaatgcagataagaaaaaggagatgaaaaatttgagtgagatgttattggaaacacgaggactgacgaagcggtatggacatcataaagctgtggacagtgtcagcatgcatattaaaaagggcgctatctatggatttatcggacgaaatggagcaggaaagacgacttgcctgaagatgatcagtggactttccaggccgacgagtggagagattgagatcttcggatacaagggaaaggatttacagaaagtccgctcccgtgtgggatgtctgattgaagcaccgggattatatggaaatatgaccgcatatgaaaatctgaatatcaaatgcaagctgtttgggataaagaaagcagcttacattgaagagatattgaaaacagtaggtctggagcatgtgggacggaaaaagacaaaacacttttcacttggaatgaaacagcgtctgggtatcggccttgctttggttggagaaccggatctgttagtcctggatgaaccgatcaatgggttagatccacagggaattgctgaagtccgggacacaattcagagacttcagaaagagagaaatatgacgatttgcatttctagtcatattctggaggaattatcgaagattgctactgattacggaatcattcacaatggaagtttgttgcaggagcttacgagggaagaattaatgcgaagatgcagtgaacggatggaattaacactggctgatccaaagcttgcaattccggtgttggatgccatgggattcacgaattatcaggtgacagacaaagaacatattcacatttttgaacgtctgaatgaaagcgcagcgttgaatatggaacttgcaaaggcaggaattccggtaaaagggatttctataacaagtgaagaactggaaacgtatttcctgaatctgacaggaggtgccagtcatgcttaatatgataaaaatggatttgtaccggatgtttcggaccaaaagtatgtatgtagtatggatcgtgctggctgtgtcagtactgtttacaacgtttatgtgtaaaacagattatgatttattaagtaaagaagataccgttcggcaggagcagtttgcggaaccgactgcggagaatattaatgtgggaatgatggtgacactgccgacagaaccgggagaaaaggttacggtgtatgacattttctttgcaaattctcaggggaaattttatgcgttgtttctggtgatttttgcggtgatgttttcaacagcggatatcggaagcggttatattaaaaatattggcggtcaggttcaaaaaagaggagcactgattttttccagagctattgcgttggcggtctttacggtgctgacaatggcaggcgcattcttactccagggagctgcgaactatatagtatttaaagaattgacgtggggcagttcaaaagctgttctgtcttatttcctgacggagctggcacttcattatgcactcgtgttgatctgcatggcgattgcaattattctgaaaaataatgtgatcagcatggtcatcgcgatttgtcttacaatgaatataatgagtatcgtatacggattgataaacagtgctgttcggaaaatgggaatccagaatttccagatttataaatatacgataaccgggaaattatcactgctttctatgaatccaagtggaaatgagtgtctggcagcattcggcgtggcgattgtgtttgcggttataatgatagctgcaagcagtgctgtttttcaaaagagggatatttagcggatgtatatcgtaattggaatattagcaggaattatcattttacaatttattattatgtggaaatatcagcggcaggtgaaggacatctgccgccaattggcgttcttgatgaaacatgacagtaacatgttgattcaacgcgagtttgatttgggtggaatcggaatgctttcagacagattgaatgaacttctggaattacaaagaaaagagaagcagcgttatcaggagaaagaagctctgattgcggatacttatacgaacctttcccatgatatccggacaccgctgacatctctggacggatattttcagcttatggaagaatgcgaaaatgtcgaagaccagaaacgttatctgaatattattcatgaaagaatacacagtctgaatgaaatgctggaagaacttttcatgttcacaaagttaaaaaatgaatcctataatctggaactgacgccttgctgtatcaaccggattctgaaagaaacggtgttttcctattatgatgactgggtaagaaggggaatccagccggatattcagattacagaagaactgctatctatagccggaaataaacaaggactccaccgtgttattcagaatgtaattaaaaatggcctggatcatggagaaaagaagataagtattgtgttagagcgcaagcaggagcatgcagtattgcgaatcaggaatcaggtgatacattcggagcagattgatatagaacatgtctttgacagattttataaagcggatgtggcaaggagcaaaacatctaccggattgggactatctattgcaaaggaacttgtgaaacgtatgaatggagaaatcagcgcaaagacagagaaaaatgagtttattattgagatgagatttccgctttctatctaaaaaatcagtaaaaattgcactttattgagttacaatgctgaattgtgaaaatttagatttaccgaaacactcaaatatgttaatatggtagcagttatttcaaaactatagatcagattgaaggaggtctttacatgattaaattgtacgagaatggcgtatatcttctcaatggaacagagatagtagaagacacaggaaatgtgcaggttccgctgacgaaggaagaagccgctcagaacacaatggcatatggtattttaaaggcacacaatacatccgagaacatggagcgtttgcagatccgttttgataagctgacatcccatgatatcacatttgttggaattatccagacagcacgtgcgtcaggacttgagaagttcccgatgccgtatgtacttacaaactgtcataacagtctttgtgcagttggtggaacaatcaacgaagatgatcatatgtttggactaacttgtgcgaagaagtacggcggtatgtatgtaccaccgcatcaggcagttatccatcagtttgcccgtgagatgcttgcaggcggaggaaagatgatccttggatctgacagccatacacgttacggagcactcggaacgatggctatgggtgaaggtggaccagagcttgtgaaacagcttctgaacaagacttatgatattaaaatgccgggcgtgatcggaatctacttagacggagagccgatgaaaggtgtaggaccgcaggacgttgctcttgcaatcatcggagctacattcaagaacggttatgtgaataacaaggttatggagtttgttggacctggagtcagcaagcttagtgcagatttccgtatcggaatcgacgttatgacaacagagacaacttgtctgtcttctatctggaaaacagatgagaagattcaggagttctatgatattcacggaagaagtgaagattacaaagaactgaatcctggagcagttacatattatgacggtatggtttatgtaaacttaagcgagatcaagccaatgatcgcaatgccattccacccaagcaatgtttatacaattgatgaactgaacgcaaatctggcagacatccttcatgatgtagagcagaaagcacttgtaagtcttgacggtgcagttgattactctctgcaggataagatcagaaacggtaagttctatgtagagcagggaatcatcgcaggatgtgcaggtggtggatttgaaaatatctgtgcagctgcagatatcatcaaaggaaagaacatcggagcagatgaatttacattcagcgtttacccggcaagtacaccgatttatatggaacttgttaagaatggtgcaattgcagatcttatggaagcaggaactgttgtgaagacagcattctgtggaccgtgctttggagcaggagatactccggcaaataacgcattctctatccgtcatacaacaagaaacttcccgaaccgtgaaggaagtaagctgcagaacggacagatctcttctgtagcactgatggatgctcgttctatcgcagcaacagcagcaaacaagggattcttaacaccggcaacagcaatggatgtagagtacaaaggacagaaatatcactttgataagaatatttatgcaaaccgtgtatttgacagcaagggtgttgctgatccaagcgttgagattaaatttggaccaaacattaaggactggccggcaatgtcagcacttccacagaacctgcttgtgaaggttgtatctgagatccatgatcctgttacaacaacagatgagctgattccgtccggagagacatcttcttaccgttctaatccgctgggacttgcagagttcgctctttcaagaaaagatcctgcatacgttggacgtgcgaaagaagtacagaaagctcagaaagcaattgaagcagatgaatgtccggtagatgctcttgcagaactgaaaccggtgatggataagattcacgagacatatccggaagttggcaagggtaaccttggtgtcggaagtacaatcttcgcagtaaaaccaggagacgggtctgctcgtgagcaggcagcttcctgtcagaaggtacttggcggatgggcaaacatcgcaacagagtatgcaacaaagcgttatcgttccaacctgatcaactggggaatgctcccattcctgacagaagaagatcatgaagcactttccttcaagaacggagattacatctttgttcctaatgtgagaaaagcagtggaagagaaagcggatgtgatcaaagcttatgttgtaggtgatgaactcaaagaactgaaccttaagctgggagatctgacagacgcagagcgtgagattattcttgacggatgtctgatcaattactatagaaatcattagtcaatcattaaatatgataaaatgaaagaaaagcggcgagatatgggaaatgacctgtatctcgctgctttgttctcatagttgtattttagagctaacatgtgttaaactaaagcataagactggaaatattgaaaataggcggtaaataaaatgatatttgatacacatgcgcattatgatgatgagcagtttgacacagacagagatgagctactaagcagtatggcagcaggcggcgttggaacaattgtggatgcagcggcgacagtagagtcctgggataagatagtagaactcgcagagaaatattcatttatatatggatcagtaggtgtacatccggatgaagtcggtgcactgaatgaagagaatttcgctcgaatgagagaattattaaagaaagaaaagatcgttgcggttggcgagatcggacttgattattattgggataaagaagggcatgatctgcagaaacattggttcatcagacagctggatcttgcacgagagatgaacaaacctgtgatgatccatagccgtgaggcggcagctgatacgatggaaattatgaaagaacatggaaaaggaatcaaaggtgtgatacactgttattcttacagccttgagatggcgcgagaatatgtaaagatgggatattacatcggagtcggcggtgttgtgacattcaagaactcaaagaggttaaaagagattgtagaagaaattccactggagtcaattgttcttgagacagactgcccgtatctggcaccgacaccgttcagagggaagagaaattcgtccttgtacctgccatatgttgtagaagcgattgcagagttaaaaggcatttctacggagcaggtgatcgaacagacagagaagaatgcaagggatttatatcaattataagaaatggagagatgagatgaaagaaccaacacttggaaatccacagaatacgatagaagtattacagaaatataatttcgtattccagaaaaagttcggtcagaactttctgatcgatacacatgtactggacaaaattattgcggcagcagagattacaaaagatgattttgtattggaaatcggaccgggaatcggaacgatgacacagtatctggcatgtgcagcgagaaaagttgttgcagttgagattgacaaggcactgattccgattctggaagatacgctttcagattatgacaatgcccgtgttattaacaatgacgttctgaaagtagatattgcaaagcttgcagaagaggaaaatggaggaaagccgatcaaggttgtggccaacctgccatattacattacaacaccaattatcatgggactttttgagaatcatgttccgatcaagagtattacagttatggttcagaaagaagtcgcagaccgtatgcaggtgggaccgggaacgaaggactatggtgcactgtctcttgctgtgcaatattatgcgaaaccatatattgttgcaaatgtaccgccgaactgctttatgcctcgtccgaaggttggatctgcggtaatacgtctggaacgttatgaagaaccaccggtgaaggtaaaggatgaaaagcttatgttccgtattatccgtgcctcctttaaccagagaagaaagactttggcaaatggactgaagaattcggcagaacttgactacacgaaggaagaaatcgaggcagcgattgaagcactcggaagaggtgcatctattcgaggggaagcccttacgctggaagaatttgcaaagctggcagattttctttatgattgcagataaaataatattaaaggaatttacaaagttgctgtttacaaaaatgtagtggacagcaactttattcttcttcactttttgattcataaagatttaatattcagttaattgtttactagacggatatctagtataattaaaagataaaagacattagaagaaacaagagaaggaggaagagcccatggccaaagatattaacagcatattttttgacatcactccggagattgaagaacttgctctgaaatgtgaaacgaacaatgcaattgacaaagaactctataccaaatacgaggtaaaaagaggacttcgagatctgaacggtaaaggtgtacttgccggattgacaaatatatccgatgtgtgtgcaacaaagattgtagacggtgtatccgtaccgtgtgcaggtaatctttattacagaggttacaatattaaagatcttgtaagcggtttccttgaggcaaaacattttggatttgaggagattgcatatctgcttcttttcggagagcttccgaatcagaaggaacttgagaattttaaggatatgatagctgaccgccggatgcttccaccgaattttgtacgtgacgtgatcatgaaggctccgagccgtgatatgatgaacagtattacaagaagtattcttcagctttattcttacgatgacaaagcggatgatacaagcattccgaatgtactgcgtcagagtctgaacctgatcagccagttcccaatgcttatggtttacagctatcttgcttacaattataaaatgggtgaagacctgtatatttatgcaccgaagaaagaactgtctatggcagagaatattctgatgatgctcagagaagatcgtcagtatacagaacttgaggcgaagatccttgatatggctcttgttcttcatatggatcacggcggtggtaacaactcaacatttacaacgcatgttgttacatcttcaggaacagatacttattctacaattgcagcagctatggcgtccttgaaagggccaaaacatggtggtgcgaacgtaaaagtaacacagatgtttgaagatatgaagacgcagctgacagactggcaggatgatgatcagatcagagcttaccttgaggcactgctggagaagagagcgtttgataagagaggtctgatctatggaatgggacatgcgatttattctgtatccgacccaagagcggagatcttcaagaagtttgtaaagcagcttgcatatgaaaagggccacgaggcagaatatgtactgtatgagaaagtagagaagatggcaccggagatcattagcgagagacgtaagatgtataaaggtgttaatgcgaacgtagatttctacagtggacttgtttatagcatgcttgatcttccaccggcattatatactccaatttttgcggcagcacgtatcgttggatggagtgcacacagactggaagagttgaagaatgtagataagattatacgtccggcttataagccgcttgcaccatatcgtgattatatcaaattagatgacaggtagtgaatgaacgatgagagatgagttttatttcccttcaaaggatggcaatacggagatccacacgattgagtggaaaccggaaggagaagtgaaagctgtcctgcagttaagccatggaatggtggaatatattaagagatacgatgaatttgcagaattcatgtgtagtcatggatattatgtcgttggaaacgatcatttaggacatggaaaatctgtgcagagcaagtcggagtatggattttttaatgaaaaatatggaaatgcatgcgtgatcggagatatgcatacacttcgtcagcggacggcgaagaaatatccggaggtgccttactttatgttgggacacagcatgggttctgcccttctgcgtcagtatgtgcagatgtatggaaatggactggcaggagcaatgtttatcggagttgtagcagaccaaaagaaatcaacacttcagtttgcaaggagactttgcagaacactggcaattttccgtggctggcattataaaagtaaactggtggatggaatggcagtcggtgcctataataggaaattcaagaatccaaagacacgcgcggactgggtaaccagtgatgaagaacatctggaaaaatatatttcagatccactgtgctcctttgtctttacagtgaatgcgtattatagcatgtttaccgggatgcttataatggagaaaaaagaaagtatctatatgattccgaagcagcttccaatccttttcgcagccggtgccgaagatccggttggaggattcggaaaaggcgtaaggaaggtttatgagaaatacaaagcggccggaatccaggacatcagtctaagactgtatgccggtgatcgtcatgaactgctcaacgagacagatcgggagcaggtatatgaagatcttctcgagtggatggaagaacgtagaaaaataaattattagtttatattttttcataatctgtttatattttttcgtcttctttaagaaaacactcatacttttgacacattttctggatatactaatatcaagatagttgataagagaaaatcaattatcttccccccctcataaagttgtgacacaggaaagtgtcaacactttactctcattcctttagataactataaacacaacgaagcccgttagccgaaaggttagcgggctttcgcgttgcagtgataacttagatggtgccagatatgaaaacacaaaaagtaagacccgagcacctcactgcttcagcagatcggcaatcgggtcttctttttattatctaaaggaatgagagtaaagtcgacatcccggcacaccgggatgccattactttatgagggggagatagttgtttatcaactatctgagccttagtatagacagaaaatgtgtcaaaattatgttcaaacattaaaagaaaaataaattaaataaacttaatcctgaacgcttacaaacacttcatagaccttcttgagtgatttatgaagataaggtttgtactcttccatagaaacaggtttctcatgaaggatacagttgtaacttgttgaactgatcaattcaatcagtgtaaaaagcaagagatccggattctcacagtttacattatattttacaagtgaatttctgtagtgatcataaaattgcctggacactacagaacctgttccgacagcatcctggaaaactccccaggagagattctttgacaaaaattttaacaaggactgctgtttctggaaacggtcaataatatagtctgttaaaaaaagaatctcttcttctaaagaattaatctcagttccttcaagctgcttgtgtgcatcatcaaaaagctgacaggctttgtatgcgatcaatttatctcttaaatcatacttgtctttgaaataaagatagaatgtcccctttgccagaccggcctgattcacgatgtcggatacagttgttttggcaaagccttttccggtgaacaggtcaaatgcagtctggagcagtgtattcattttcagctttttattatcatctacttttcccataatctcaatgacctcctttgtgtgtctttagtgagtgtaatatataatacaaactttgccaataagaggttttcataaaaatacattctgtgaaaaattcctattgtctttttactagtatggcacaaaattcccaaaagtcaataaaaatgaccatttttcattttttaacaaaaaaatattgactaatggtcactttgcgctatactataagagaattgagtagtgagacagtataggagatgatacaaatggttaaagttggcaaatggattgccaaacacagagttctgatgttgatcatcggatttcttctgattatcccgtcggtcatcgggatggcaaagacacgtgtaaactatgatttgctcagttatctgccggagcatctggagacagtaaagggtcaggatattctggtggatgagtatggaatgggcgcgttctccatggttgtggtagagaacatggacatgaaggatgttcagaagcttgaagatcagttcagtgaagtaccgcatgtaaaagatgtactctggtatgacgatgtagctgatatcagtcttccggtggagatgatcccaaatgatttaaaggaggcgtttttcaaaggcgatgccacgatgatgcttgtattgtttgataatacaacatcttctgatgaagctatggatgctgtcggacagatgagaaagctggcgaatgatcagtgctttatcagcggtatgacaggagttgttacagatattaagaatctggcacttaaagaacttccggtttatgtggtgattgcagcacttttaagtctggtcgtacttgaactgacaagcggatctttcgtagtaccgattttatttctgatcagtattgggcttgcgattctctacaatcttggaagcaatattttccttggagagacttcgtatatcacaaaggcattgactgcggtattgcagctgggtgtgacaatggattattccattttcctcttgaacagctacgaggaaaacaagaagcgttttccgggagagaaagaacgtgccatgggacatgcgatttctaatacatttaagtctgtggcaggaagctctgttacgacagtagccggattcgtagcattgtgtgttatgacatttgcacttggccgagatcttggtatcgttatggcaaaaggcgtattgatcggtgtgatctgttgcgtaacagttttaccttctctggttcttgtatttgataaaccaattgagaagacaaaacataaactgttgctcagcaacatggataagccatcagcttttattacaaagcactataaagtatggatcgttgttttcctggtacttttattcccggctatttatggaaataatcacacaaagatttactacaacattgcagattcactaccgtccacactggacagtaatgtggcgaatgcagaacttaagaaagacttcgatatgagtaatattcatatggttatgttagatagaagtatggatgcaaaacagaagtcgaaaatgttcgatgagattgattctgtgaagggtgtcaagtggacgatcagtatgaattcgctgattggaccggcagtgccggactctatgataccaaatgatatcaaagaaatactgcaaagcgatgattacgagcttgcatttgtatgctcggaatatgaatcagcaacagaggaagtcaatacacagattgcatcgatcgataagattgtaaaatcttatgataaaaatgcgatggtaattggagaagctcctttgatgaaagacttggaggatgtaaccaatgtggatctggtaaatgtaaatgcactttcaattgcagcgatatttatcattattatgattatcttcaaatcaatatcactgccaatcatattggtggcagttattgaatttgcaattatggttaatatggcaatcccgttttatcagggaacaagccttccatttgttgcaagtatagtaatcggagcaattcagttgggagcaactgtagattatgcaattctaatgacgacccgctatcagaaagagcgtcagcgtggacgagataagatggaagcaatcagtattgctcataaaaccagtatgccgtcaattatcagtagcggattaagtttcttcgcggcaacatttggagtagcctgctactcacaggttgaaatgatcggttctatttgcactttgcttgcgcgaggcgcgattatcagtatggttgtagtaatcctgatattgccggcgatgtttatgatatttgacaaagtaatatgtaagacgtccatcggattcctcggtggaaaaaagtagaaaggatgtaagaatcatgaacaaaaacagaaaaatcaaacgtggactcacaacttctcttgccgttggaatgtcagtaatgatgggcgctgtgccggtctttgctgcaggaacaagttctgacgcagatgcagtttataaggaagagacagtttatgtaaatgcagacgcaacaggaacaattgatgaagtaacagtatctaactggctgaagaattcaggcagtgtatcaggaagtctgacagatgcaagtactctgaaagatattaagaatgtaaaaggtgatgaaacattcaaagcatccggagatacattgacatggaatacagacggtgaagatatttattatcagggaacaacagatcaggatcttccggtttctgtaaagtttacttactatctggacggaaaagaaatcaaaccggcagatctgaaaggaaaaagcggacatctgaagattcaggtggattatacaaataaagagaagaaaacagtcagcgtagatggaaaacaagaagaagtttacacaccatttgtcatgatgacgggaatgatccttccgaatgaaacatttagcaatgttacgattgataacggaaaagttatttctgatggaagcaagaatatcgtagtcggatttggaatgcctggcatgaaagaaagtttgaatctggacgaaagcaaaacagaagatctgacaatcccggaaagtctctgcgtggaagctgatgtgacagatttcacaatgtcttctacatttacagtggcacttaccgatcttcttgatgacattgattttgataatatcgtagatgttgattcactgaagagttccttagatgaactggaagatgcagcacttcagttagtaagtggatctgacacacttgcagacggagctggaacacttgcagacggtgtcaacagttatacagaaggtgcggatactttgaatgatgcaattcagaagtaccttggaagcaatggagaactgaacggaagcgtgacagagtatgtgaatggtgtcaataaagttgtcaaaggcgtgcaggattatacagatggaacaaatgcactggctgacggagttacagcttatattgacggtgaacagcagctggcagcaggtgccgcgaaactgagccagctcagcagcggactgaaaacagtacagggagcgatcagtcagctgaatgcagcaattgatggagaaggcagtgcgacagaagatattcagtcagcgtcaagacaattggcagcaggtacagcacagcttaaggcatcccttggaagccaggaagtgcaggcacttttgggtcaggttgaaaacatgcttacaaccggaaatgaaatgatcgagcagacagagcagcttgaaacagcattgaatgatggaattgcagtaccggttcagaatatagcgggtaatttacagagtctgagtcagcagcttggagcaattaatcagcagcttgctactttggacacaacttgtcagagtgcagtagatgatctgaatgcgaagattgcagattacaataataaagtagatgcagcgcagagtgcagcaacaagcagcaaagcaactatcaattcagcaatcagtgaattacagacaaagaaagatcagacaacagatgagacagcaaaggccgatcttcaggcagcaattgataagctgaatgcggcatcaaatgcagcggatggactgcttggactggagaaggcaagtgaagtgtcagtgtcacttccgtcaattgacacaactccaattcagaaggaaatgggagagattgcagcatctatggaaacatttaaaaagactgcaaatgatctgaacgctcaattaccggaaatgaaaaagaagttagagtctattacagctatgaagtcacagcttccgacagaggcacttggacagctgaccgcatcagtagatcagttgaatgcaggaatgcagggattgaatgcagcaatcggatccttctcatctaatctcggaacattaaatgagtctgtacaggcacagttcccggcagcagttacaggaattcttgaactgaacggcggattctcacagctgagtgcaaataatgatgcacttttagcaggagccaacaaactgaaagctaacagttcaacactggtagcaggagttcagacacttcagagcggaacaaaccagctggcaagcggactgaatacactgggaagccagatgtcatccggagcggcaaaactttcactgaacagcgcagcccttcgtgaaggtgcagcaactcttcagtcaggagcaagagaactcgcagacggtatggagaagttcgaccgtgaaggaacaagcaaattaaagagcacagtagaagacgaacttggtgatgtacttgaccgtttcgatgcacttacatcggatgattgtacttatacaacattcagtggaaaagacagcggaatggaaggaaacgtgaaattcgtaatcgagacagaagcaatcgagtaaatcgtatcatctctataatataggaaaaacggagaaatccccgaccaggatttctccgttttgttactgtgtcaatcagcggagtgattgacacgggagtgaacagtaactccgtttttcgttttggaatttgccatcacaagaagggattgcaaaaaataccattatgtagtagtctgtctatagagatgctattgaatgcacagtagaacaaattgatagtagaaattatggtatgtggggaagatatggaaggaaatttaacaaagggtcctattttaaagaccttgacaaagttggcgataccgattatggcatcgtcatttttagggacattgtataatcttacagatatggcatggatcggtctgcttggttcgaaggcagttgccggagttggtgtcggaggaatgtacacctggctgtcacagggactggcatccatggctcgaatgggcggacaagttcaagtagcgcaatgcatcggaaaaggaaatagagacgaggcgaataaatatgcacagaccgcagtacagttagctacattgatgggattagtatatgcggcaattgtattgctgtttttacatcgattgatcggcttctttcatttggatgatgcagaagcaattgcggctgcactttcttatacaagaattgcctgcggtttgatcgtattttcatttctgacatttacattgacaggtatttatactgcacagggagattcaaagactccatttattgcgaatctgatcgggctggtaattaatatgattctggatccggtactgatccttggaccggggccacttcctgaattaggtgtggcaggtgcagcgattgcgactgtaacagcgcagggaattgtaatgagtgtgatgattatcggaatctttgtgcagaagaaggataatgtattaaaaggaattcgtctgtttgcaagaattccgatggaatatgtaagtggaatctgcaagatcggaattccgacagcacttcagggaatggcttattgtgtaatctcaatggtacttgcacgtatggtatccgtctttggtgctgaggcagttgcagtacagagagtcggtggtcagattgaatcgctctcatggaatacggcggatggattcgctgcggcgctgaatgcatttgttggacagaactatggagccaacaagatggatcgtgtcaagaaaggatacagagcatctttatggacagttggtatttggggattgataattacagcaatatttgtatttgttccaaaaccaatcgcaagaatttttttccatgaagcaacagcaattgaaatcgcagtggattaccttataatcgtaggactcagtgaagcatttatgtgcgtagagcttatgacggttggggcattgtccggacttggaaagacacatctgtgcagtgtgatttcaattatatttacaggagcgagaattccattggcaattctcctttgcagaacagcactcggacttaatggaatctggtgtgcagtttcatcaacatctattgtaaaaggtattatctttgtagcaacattcttctggattacaagaagttcaagaatacttaaggataatagcaggctttgattaagaaaagcctgctattattcttttataaaagaggatagttcaaggaaggtattggagaaaaaatgaaaatagaaaaacgatgggaaaataatagaagtaaaatgatatcatatattgtatttggagcatatctcttcttactgacatggcttgtgctgtttaagtttgcatttactatagaagaaatcccacatttaagacaactaaatctaatcccatttcattacgaaacaagtgttgcgtatataacacatatgaaagaggttatatacaatatactgatatttgttccggcaggagtttacttcactgcatttcttggtaaaagaaaatggtggctggggatcggagcatcattttttgtgagcctgacatttgagacagtacagtggatattctctattggcgtaagtgatattacagatttaatcggaaatacacttggtagtggggtgggagcagtgctctttgcattttttggaaaaatatttccaaagaagagaatgagcatgatcaatggaatcggagcagtggttgaggtagtcggaattgcattactgagtatgctgtttgtgacaaataagtaagcatgcaatattcgtagcatttggaaacgcagattacgcatcagcaacaaccgaaagaactgacgtcctttcggttaagggcattcgccctatgttccccaaccctaccagtttattgcaagcaagcttgcaatagctgtcgtgttttggaatgtatgttacgcatctgcaacaaccgaaagaactgacgtcctttcggttaagggcattcgccctatgttccccaaccctatcagcttactgcaagcaagcttgcaatagctgttagtgttggggaacgcagatgctaatttttcagaatattctgaattgcatgaaatatataaaaaatattgacaattaaaaacagctgtgataagataacattcgtcgctgaggaacagcaaagaaaacaacagaggaacggaagatgaaagaagacgcggaggcggaacattcttgatcggaaggaaacttagagatttaaaaatcaatgaaatgattgaaaaataaatcaaaaaagttgttgacaaagagttctgaaagtgatatcctaaataagctgtcgcgtgagacggcaaaggaaagctcgaaaagagcgacaaagaaaaataaaaaagttcttgacaaagacaaaagcttttgataaaatataaaagctgtcgcttgaaaagaacgacacaaacaaagaaccttgataactgaacaatagacaacaacaacccttgaaaatttctttaagagaagatttttaagaacggtttttaaacaaaccaaaacaacagtaaaaagggaagaattagctagttagttggttctgaactggatacaaacacttttaacgagagtttgatcctggctcaggatgaacgctggcggcgtgcttaacacatgcaagtcgaacgaagcaccttattctgatttcttcggaatgaaaaatttggtgactgagtggcggacgggtgagtaacgcgtgggtaacctgcctcatacagggggataacagttagaaatgactgctaataccgcataagaccacagcaccgcatggtgcaggggtaaaaactccggtggtatgagatggacccgcgtctgattaggtagttggtggggtaacggcctaccaagccgacgatcagtagccgacctgagagggtgaccggccacattgggactgagacacggcccaaactcctacgggaggcagcagtggggaatattgcacaatgggggaaaccctgatgcagcgacgccgcgtgagcgatgaagtatttcggtatgtaaagctctatcagcagggaagaaaatgacgatgccatgactaagaagcaccggctaaatacgtgccagcagccgcggtaatacgtatggtgcaagcgttatccggatttactgggtgtaaagggagcgtagacggagtggcaagtctgatgtgaaaacccggggctcaaccccgggactgcattggaaactgtcaatctagagtaccggagaggtaagcggaattcctagtgtagcggtgaaatgcgtagatattaggaggaacaccagtggcgaaggcggcttactggacggtaactgacgttgaggctcgaaagcgtggggagcaaacaggattagataccctggtagtccacgccgtaaacgatgactactaggtgtcgggcagcaaagctgttcggtgccgcagcaaacgcaataagtagtccacctggggagtacgttcgcaagaatgaaactcaaaggaattgacggggacccgcacaagcggtggagcatgtggtttaattcgaagcaacgcgaagaaccttacctgctcttgacatctccctgaccggcaagtaatgttgcctttccttcgggacagggaagacaggtggtgcatggttgtcgtcagctcgtgtcgtgagatgttgggttaagtcccgcaacgagcgcaacccctatctttagtagccagcggttcggccgggcactctagagagactgccagggataacctggaggaaggtggggatgacgtcaaatcatcatgccccttatgagcagggctacacacgtgctacaatggcgtaaacaaagggaggcagaaccgcgaggtcgagcaaatcccaaaaataacgtctcagttcggattgtagtctgcaactcgactacatgaagctggaatcgctagtaatcgcgaatcagaatgtcgcggtgaatacgttcccgggtcttgtacacaccgcccgtcacaccatgggagtcagtaacgcccgaagtcagtgacccaaccgtaaggagggagctgccgaaggtgggaccgataactggggtgaagtcgtaacaaggtagccgtatcggaaggtgcggctggatcacctcctttctaaggaagaaagaagtaaagcgttttactgttgtctattgttgggttatcaagtaacctaaagcttttggtggcgatgcgcttaggggtaacacccgttcccatcccgaacacgatggtaaagacctaagcggccgatggtactgcactggagacggtgtgggagagtaggtggccgccaaatcataaaaaaagaaactaaggcagagacgctgccgaagttgaatatatagatacaggcacagatgagcaacaacttatcgccgccaacccaatcagcagggcagtgctgttatgatagctggtttcaccagtgattagatatacaaagagatttgtgtatgtaatgactgatgaaagtcggtcaagatgcgaagctctaaaacctacggttttatcgctcatggcattacatgccaatgcatcgaaaagcatttgcacttagagaagcaagcttgtcacgtacaactgttttcgatacgctcgcatctttatgtaccttgaaaactgcatatagtaaaaatcaatagatttagataaatatctaatcaagacatccgaggtaatgttaacaacattaacttacagtctgaagaaaacagacttaaaataaattgactatcaccaacgcatacaacgctatgtatgtgtggacattatcccattcccgtgggatgaggtcgagttggttatgctgataagagcgtatggtggatgccttggcactaagagccgatgaaagacgtgataagctgcgaaaagcttcggggaggagcaaatatcctttgatccggagatttctgaatggggaaacctacttgagcaaacctcaagtatcctaacgccaatacataacgttaggaagggaacccggtgaactgaaacatctaagtagccggaggaagagaaaacaacatgtgattctgtgagtagcggcgagcgaaaacggaagagcccaaaccagcgtgcgtgcatgctggggttcggaccgcggaattgattcaacgagtttagcagaacggttttgggaaagccggccagagagggtgaaagccccgtaagcgaaagacgagttgacatggcgggatccagagtaccacgagacacgtggaatcttgtgggaagatgcggggaccaccccgtaaggctaaatactacttagtgaccgatagcgcatagtactgtgaaggaaaggtgaaaaggaccccgggaggggagtgaaaaagaacctgaaaccatatgtttacaagctgtggaagagctttatatgctcaaccgcgtactttttgtagaacggtccggcgagttacgctggctggcgaggttaaggactaaaggtccggagccgaagggaaaccaagtctgaatagggcgcatagtcagtcggagtagacccgaaaccgggtgatctatccatgtccaggttgaagttgccgtaaaaggcaatggaggaccgaacccacatccgttgaaaagggtggggatgaggtgtggataggggagaaattccaatcgaacccggagatagctggttctcctcgaaatagctttagggctagcctcatacgagtcttgcggaggtagagcactgaattcctaagggggcgtcaaagcttactaagggatatcaaactccgaatgccgtgtagatgatgtatgggagtcagacgatccgagataagttgggtggtcaaaagggaaagagcccagaccaacagctaaggccccaaaatgtgtgttaagtggaaaaggatgtgggatttcgaagacaactaggatgttggctcagaagcagccattcattcaaagagtgcgtaatagctcactagtcgagagatcctgcgccgaaaatgtccggggctaaaacacactgccgaagctttggaattgagaattcaattggtagaggagcattcttaaagggatgaagcagtaccgtaaggagctgtggacttttaagaagagagaatgccggaatgagtagcgagaggaaggtgggaatccttccggccgaatatctaaggtttccagagtaaagctgatctgctctgggtaagtcggggcctaaggcgaggtcgaaagacgtagtcgatggataacaggttgaaattcctgtactatcctgtaacagaactgtggggacacaggcagagagcgtgagccgggaatggaaagaccggtacaagcgaggtaggagtctggttggcaaatccgccaggcaatctgaagacgtgatgtggactgaaaataagtagggaagcacgtgagctgactgtcaagaaaagccgctattgtttgcaggatacccgtaccgtaaaccgacacaggtggatgaggagagaatcctaaggccgacgggagaagcattgttaaggaactcggcaaaatgactccgtaacttcgggagaaggagtgccagtaagatggccgcagagaattggcccaagcaactgtttagcaaaaacacaggtctatgcaaaaccgaaaggtgaggtatatgggctgacgcctgcccggtgctggaagcgttaaggggagaggttagcgcaagcgaagctttgaacttaagccccagtaaacggcggccgtaactataacggtcctaaggtagcgaaattccttgtcgggtaagttccgacccgcacgaaaggcgtaatgatttgggcactgtctcaacaatgcacccggtgaaattgaaataccagtgaagatgctggttacctgcgccaggacggaaagaccccatggagctttactccagcttgatactgggattcggtattgcatgtacaggataggtgggaggctaagaagtggtaacgccagttgccatggagccgctgttgggataccacccttgcagtactgggtttctaaccagcagccgtgatccggctgggggacaatgtcaggtggggagtttgactggggcggtcgcctccgaaagggtatcggaggcgctcaaaggttccctcagaatggttggaaaccattcgaagagtgcaaaggcagaagggagcttgactgcgacaccgacgggtggagcaggtacgaaagtaggacttagtgatccggtggtataaagtgggattgccatcgctcaacggataaaagctaccctggggataacaggcttatcactcccaagagttcacatcgacggagtggtttgagcacctcgatgtcggctcatcgcatcctggggctgaagtaggtcccaagggttgggctgttcgcccattaaagcggtacgcgagctgggttcagaacgtcgtgagacagttcgatccctatccggcgtgggcgtaagatatttgagaggagctgtccttagtacgagaggaccgggatggactggccgctggtgtatctgttgtcttaccaaaggcatagcagagtagccaagccgggaagggataaacgctgaaggcatctaagcgtgaagcccccctcaagatgagatatctcataacgtcaagttagtaagaccccttgaagacgacgaggtagatagggcagaggtggaagtgtggtaacacatggagctgactgttactaataggtcgagggcataaccaaagcagtgataggtttggatgatgatgttggttttgactgtatgtagttttgaaggtacatggaatatggacaggaatgagaagcagtgcgaaagcgctgttttttttatcaaaataaaaatctctgtaagttagtctgatcggagtattgattatttttggatttatccctaggaaaaagcactgatttgcgttatactaagaaagatgtgaatgaaaacatggtacaaaggagatggagcaatgattcgttttacatggtatgaactgctttggctgtttttcatctattctttcttaggatgggtgttggagacagcagccgcaacagtaaaacagaagaagtttgcgaacagaggtctggtgaatggaccgttctgtgtgatctacggtatcgccgctctgttcatgacatttggattacaggagctaagaggagtctggctttttttatttgcggcgatttatgcgacagtgattgaatgggttgcagggcatttgatcgagaaggcatttaaagccagatggtgggattactccaagatcagatggaatctggacggatatatctgtatcccggcttctcttgtctggggtgctcttggatatcttggaatccgctggggaaacagatttgcaatcgtagtatttaaaatgttgccgctcttcctgatgaagatccttgtgttgattcttcttggaatacttattgtggatatccttggatcttatttacttctgcgtggaaaaggaaagaatctggcgcgttgggaagctacgaatgagggactggacagagtcagtgataagcttggtcgtatgatttccacttgggttggaaaacgtatccaaaaagcgtatccaaaggcagtcgaactgatccgcaaggaagaggaagcggagaagggaaaagtatttgccgcaggctgtgggttctataagatcgtgctgttgttttttgtcggagcatttcttggagatattacagagacgattttctgcaggatcacggcaggtgtgtggatgagccgatccagtgtagtctggggaccgttcagtattgtttggggactggcgatcgcacttgtgacagcaatgctttacaaatataaagataagagtgacagtttcttatttatcatcggtacgttgctcggtggagcgtacgaatatctttgcagcgtgtttaccgaaattgtattcgggaaagttttttgggactatagcgagattccatttaacttaggaggccgaatcaacttgttgtactgcttcttttggggaattgcggcagttgtctggtttaagaagatttatccgtacatttccgcatggatcgagaaaatcccgatgctggcagggaagctgcttacctggtttttgatcgtgttcatgatctgcaatgttgcggtgtcatgtattgcactcgttcgttatgacgaacgtggaaaaggtgttgtagcggaaaatagtattcagaagtgggcagatgaacattatgatgatgtgaagatggagaagatttatccaaacgcaaaagcgacagaatagagaataaaaggagaagaggaaaaggcatgatggagaataaaaaattgcgggcacagcatccgaagaaagagcttgcagtggatattttgtatgatattataggaagtattttgtttggtgccggaatctatacatttgcagagggaggaaattttgcgcctggaggaatctcaggtattgccttgatcatgaacaagttatggaatcttccggttggtacaatgacgttgatactgaatattccactggttatcatcagttataaaacagtaggaaagcggtttttgataaagactgcgaggacgatgattatttcaacgatcttcgtcgatcttgtatttccaatgtttccgttctatacaggacagcgtctgcttgcagcgatttactcgggcgcattgctcggacttggaatggttcttttctatatgagaggttcttcttcgggtggagcggatttcctgacaatgacgatcaaaaagaagagaccgcatatgtctcttgggcgattgacgctgctgatcgacctgattattatcttgatcggatggccggtattcggtgatgttgattcggttctttatggattgatcgcagtatttgtctgctctatggtaattgacaagatcctttacggaatcggtgcaggatcacttgcgattatcgtaacatcgaaaggagaggaaacagcggaggagattggaagaatcaccgatcgtggtgttacttctctggaaggaatggggacttatacgaagagtaagagaaatgttttgctctgtgcatgttctaagtcagaagcgtatcttgtgaaaaatgcagtttaccaggtagatgactcggcctttgtaatgtttactgagacaagtgaagtgcttggagaaggattcaaggaaagtctggatgagttgtaaataaaatagaagaacagttacgaatatgaaatataaaaagctgctgtccatctgttgtttacgaggtttgtgaacaacagacggacaacagcttttctatatgctttatatgtatagatttgttttcaaagattcaaaaatgttaatcttctttcgcccagtcgaaggaatatttaacagccttgtgccaacccttcagtttcttttcacggatttccgggtcaattgaaggttcaaagatctgatcaatcgcccagttctctttgatttcttcaagactgttccagtagccgactgcaagtccggccagataagcagctcccatagcagtcgtctcaacgcagaccggacggtggacaggtgcgttgatcagatcagcctgtgtctgcatcaggaagttatttgcgcttgcgccgccatctactttcagggaagcgagatcgatgtcggaatctgccttcatggcagtcaggacatcatatgcctgataagcgagagactcgagggtcgcacggatgatatggtatttatttaccccacgtgtcaggcctacgatcgttccgcgggcatactgatcccaatagggagcaccgagtccggtgaaagcaggtacaacataacagccgtttgtatttttcactttctttgccatgtattcgcaatcgtcagcggaatcaatcagacgcaattcatcacgcagccactggatcgctgcaccggcaacaaagatagaaccttccagagcatatgtaacctttccgtcaagtccccaggcaatcgtggtgacaaggccgttgttggaaaagacaggtttttctccggtgttcatcagaaggaagcatccggttccgtaagtattcttcgcatctcccggtttgaaacaggtctgaccgaaaagtgcagactgctgatctccggcagcaccggcgattgggaccgctccgccaaggacggatggatctgtctctccgtaaatgcagctggaaggcttcggtgtcggaagcatacagcgtgggatctgaagttcttcgagaatctcgtcatcccagtctaatgtattgatattgaaaagcatggttcgtgatgcgttggagtagtctgtaacatgtactgcgcctttcgtcagtttccagatcagccaggtctctactgtaccaaagagcagttctccgcgctcggcacgttctcttgctttcggaacgttgtcgagaatccagtggatctttgttcctgagaaataagcatcaagtacaagacctgttttctggcgaaactcttctgtcagtcctttttctttcaaagaatcgcagaattcagcagtacgacgacactgccagacaatcgcgtggcagaccggatcaccggtattcttatcccatacgatggttgtctcgcgctggttcgtgataccgattgcagcgatatcagaaggttccgcgccgatgatgttcatagcctccacagcaactccgagcatgcttgcccagatctcgtccgcatcgtgctctacccagcctggttttggaaaatactgtgtgaattctctctgcgtgacgctgcagatttccccttttttattaaataaaatgcagcggttacttgtggttccggcatctaatgccataacgtattttgacataatatgtgcctcctcattctagtattactcagaacagtaatcgaggttcgttctgttctatattctaataagataagaatatcataatcggaatggaggttcaatggacgaaaggtgctgtaataactaaattttcgcattttactgtattttactgtatgcatgcttgcaaatctttttgcgataccgtaaaataaattttgaattgcttttcagcagttcgccttatgcaactaataacgatacagagacattagaaagttttattttcttatgcatttttataataagaaaggcggtatattccatgggaatgatacgtgctgaaaagcttgtatttgaatatgataaacgagacgaagaaggtaatgtgatcggatcccatcgcgccattgacggagttgacattgatgtcccgcaggggtcttttgtggcgattcttggacataacggttcaggaaagtctaccctggcgaagcatatgaatgcgattcttgtcccgacaggtggaacgatgtgggtggacggaagagatacgaaagatccgaatgagctttggaacatcagacagagcgccggtatggtatttcagaatccagataaccagattatcggaactgttgtggaagaggaagtaggattcggtccggagaacttaggagttcctacggacgagatctggaaacgggtagagaacagtctgcgtgcagtcggtatgctggagcgcagaaaggattctccaaataaactgtccggaggccagaagcagagggtggcgatcgcaggagtaatcgcgatggagccgaagtgcatcgtgctcgatgagccgacggcgatgcttgatccgaatggacgaaaagaagttattgaagcggtagagcagcttcgaaaagagaagaatgttacggtgatcctgatcacacattatatggaagaagtgatcgatgcggatcaggtatttgtaatggatgaagggcatgtggtgatgcatggtacaccgaaagaaatcttcagccgggtagatgaactcaagaagtaccgtatggatgtaccacaggtgacaatgctggcagacgcattgattcaaaaaggagttccgctgccgaaaggaattcttagaagggaagaattggtggatgccttatgtcaattaaattagaaaatatcagttatgtatatagcccgggaactgcatatgagcatcatgcactgaaggatgtcagtctggagattccgcagggacagtttgtgggaatcattggacacacgggttcgggaaaatcaaccttgatccagcatttgaacggtctgatgaaagcaacctcaggaaaattactttatgaggggcagaacatttacgaggacggatatgatatgaagaaactgcgtacacaggtaggacttgtgttccagtatccagagtatcagttgtttgaagttgatgtgttaagtgatgtgtgttttggaccgaagaaccagggactttccaaggaagagtgcgagaagcaggcaagagaagccttggagcttgtaggatttccggagaaatattataagcagtccccatttgaattatctggaggtcagaagcgtcgtgtggcaatcgcgggaattcttgcaatgcatccgaaggtacttgttctggatgagccgacagccggactggatccgaagggacgagatgagatcttagatcaggtaaaattgcttcatgagaagaccggaatgacagtaattcttgtttcccatagtatggaagatgttgcaaaatacgtggagcgcctgatcgtgatgaatgatggagaaaagatgcttgacggtacaccggaagaagtgttccgccattataaagagcttgaggctgttggactggcagcaccacaggtaacatatgtaatgcatgatctgaaagaaaaaggatttgatgtatcagcagatgcgacaactgtggaagaggctgcggacgagatctacaacttcctgaagaagagacaggaggtgcagtcatgatcagagatattacgataggacagtattatccggcgcagagtccgatccacagactggatccgcgtgtgaagattgtctgcacactgatctttttggtttctttatttgtgcagaacagtgtgcttggatatgcattggcatttgtatttcttgcgtgcatgattcacgtttctaaagtcccggcaaagtttattggaaaaggacttaagccgattgtgatcttgttattgtttacagtggctatgaacttgttccttacaagaggcggtgcagtgttattccattggggaatcattacgatcacagagacagggcttcgtacttctgtgttcatggcagtccgtcttgtactgcttgttgcaggttcttctttgatgacatttacaacgactccgaacggactgacagatggactggagaagctgcttcatccactgaaccgaatccatgtaccggtacacgaaatttcgatgatgatgtctattgcactgcgttttattccgattctgctggaagagacagacaagatcatgaaggcgcagattgcaagaggagctgattttgaatcaggaaatattatccaaagagcaaaggcaatgattccgattcttgttccgcttttcgtgtctgcattccgaagagcgaatgatctggcgatggcaatggaagcccgctgttatcatggtggcgaagggcgtacaaagatgaagcctttgaaatatcattatcaggacagacttgcttatgcaatcacatgggggtatctgattgcgattgttgtgatcggaagattcgtaccatttaaattgtggatattttaatgaagagaagagggacggagatttctgtcccttttgttataggagaaggtttttagtaggagaaaggttttagatatgagaagaatcagactaagggtggcatatgacggcactgcttattgtggatggcaggtgcagccggaagtgccgacgattgaaggtgaattgaatcaggcaatctctagacttacgaaggaagagattatcgtgatcggggcaagccgcacagatgctggagtccatgcgaagggaaacgttgctgtatttgacacagagtctacaattccggcagaccgatttgcttatgcattgaatccactgcttccggaagacattgtggttgtggcatcagatgaggtggaagcagactggcatccaagacattgtgatacggagaaaacgtatgagtacaagatcttaaatagcaagttcccggatccgatgagaagaagagacacgtatcatgtttcatttgatcttgatcttgagaagatgagagaggcagcaggatatctgaaaggggagcatgactttaagagtttctgtaatgttcatactcaggtggaagatacggttcgcacaatttatgatctagaagtagagaaagaaggggggcttattaccattcgtgtccgtggaaatggattcctctacaatatggtccggatccttgcaggtacgttgatcggagtcggaagaggagcaattgccccggaacagattccggccattcttgaggcaaaggatcgccaggcagcaggaatgacagttccaccacagggactaaggcttgttgaaattgactaccttgaagaaaaaagtaaataattttttgtaaaggttgacaatgaaccgtttcgctgttacactagacagtgtggtgattgtcagtagacagaaccaaatttcagacggagacccgaagaaaagagtatgtctgaaatttgtttttgtaaaaaataacgaaaagaatcgcggaatacataaaaatataaaaaaagtataaatattattaacaaaatataaaatatttgattgacttttatgtgcaggtttgttatactgaatcacgtagaaaagagataacattgacgaacagttatcattaaagaaggattgttactgttaggcaggcaaaaccagattttatgagcgtcaccggatgaatcagggggatgccttaaagtttggcttttttatttattagggagattctcccgaagttagagaaaggccaatcggatggttatagacaaaataattaataacaacattgtatctgcatttgatgaaacaggcttagaagttgttatcatgggacggggaatcggattccagatgaagcgggggcagaaagttccggtggagaaggttgagaagattttccgcatcaagagtcagagcatagcagggcagctcaaggaattgctggcgaagatgccgcttgagcaggttcagatctccaatgagatcatttcttatgcgaagaagacaatgaagctgaaattaaatcaaagcatctatgttacattgacagatcatatcagttttgcaatcagccgctgtaaaaaggggattcatcttgagaatgcgttgctgtgggagattaaaagattttatccacaggaatttgaactcggaagatatgcggtagaacttgtgaaaaagagactggatgtagagatgcctgaggacgaagcaggatttattgcattgcattttgtcaacgcagagtatggaacagatattcgggatgcggtacgatttccaaatcagatgaaagagattcttggaatcgtagcagatgaacttggaattgagatggatgaaggctcgctgcattatgagagatttctgacacatgtgaagtttcttcttcagaggatttatcgtaaggaattgctggaagaggaagagaatgagatcacagagatgatgcagagaaagtatccgaaggagtattcttgcagcagaaaagttgcagattacatagaacagacggcagactgcaagctgtcaggagaggaagttttgtatctgacactccatattcgccgtgttgcgatggcggattcggaggacgaataaggttgctttgaacggtaacaaaagtgaaaggctgcattgagaaatgaacagccgcagatgaacttggactttagcgcattgcgcttttgtcatagatggttctctggtttgtggaagacccggaggatcagaggtgattttgaccggaggactcatttgccggttaaaataaaaagggattaaaaatgagagattattaaggagggaattctatgaaattcgtacagaaattaggaaaagctcttatgcttcctgttgcttgtcttccgatttgtggtatcctgatgggattaggatacgcaatgtgtccatctactatgcagggtggagatgtaactggtgttgttgagcagatcggatttttccttgtaaaagctggtggtgccttgatcgatcatatggcactcctctttgcaatcggtgttggtgttggtatgtctgatgaccatgatggtacagcaggtcttgctgcacttgcatcctggctgatgatcacaaaccttctttctactggagcagtatctgttcttagaacactggaagaaggatcaacagcatttatcgcattcagcaaaatcgaaaacccatttatcggtatcatcgccggtatcatcggtgcactttgctacaacagattcaaatcaactaagcttcctgactggctgtcattcttcagtggtaagcgttgtgtagcaatcgttgcaggtgttgtttctattattgtatctgcagttctgctctttgtatggccggtactctttgcaggactggttgcacttggaaaaggaatcgaaggaatgggagctcttggagctggtatctatgcattctttaacagattacttatcccgttcggtctgcaccacgcactgaacaatgtattctggtttgatacaatcggacttggagacctgtcacacttctggaatggagaaacatctgcagacgtttcctggagtcttggaatgtacatgtcaggattcttcccatgtatgatgtttggtatccctggagcagctcttgctatgattcagtctgcaaagagcaataagaagaaagttgcaatcggacttatcgcatctgcagcaatttccgcattcgtttgtggtgttacagagccattcgagttcgcattcatgttcctcgctccggcactttacgttgtatacgcattactgtatggtatctttacagtaatcacagtagctcttggattccgtgcaggattcagcttctcagcaggacttacagaccttatcttctctgctccccttccggcagcagctaagacatggcttatcattcctcttggaatcgcagctttcatcgtattctacgctgtattccgtttcgcaatcgttaaattcgatctgaagacaccaggtcgtgaagatgacgatgatgatgaaacaaaagttgttcttgcaaacgatgacttcacaacagtagctaagatcgttcttgatggtgttggtggaaaagataacgtagagtctgtcgacaactgtatcacaagacttcgtcttgtaatcaaagattacacaaaggttgatgagaagaagatcaaatctgcaggtgttgcaggcgttgttcgtccatctcagaaagacgttcaggtaatcattggaacaaaagttcagtttgtagctgacgagttcaagaaactttgcaaataagtttaaatgataattaggttatccgggataatgatgtgaaagaatacggataacacacacattaataatcccttttcaaaagcggaagtggaatcggcgaagagccggggacacttccgtttttatatattaggaaagttctttcctaatatataaaagcgctccgctagggatgcgcactgcggcgtacaaggtaggtgtcgcaagcgaccgccgcaggcgctagaatgtgccaaggcacattctttgttatatatacaagaccacttgacaaaaggattacaatagtctatcatcaagactacgagagtttattatgactcttatatggaagttatatatgtaaggctatgaagggaacaagtaacagacagaacagacacacagaaagctgccggctgatgagaggcgcgtagatgactgactgtgaatacatcccggagcttcacaccgaaatctgatgatggaagttcaacgattgatatggacagcagatcggacagagagtaggctgtgacggagttgtgctcgttattgcacgaaggagactgacagatatcttgtcggtgaattaaggtggtaccacggtgatagatcgtccttattgcgtcatgcagtaaggacttttttaatacaaaataatctgatgctgaatgatgcgttgtagtgttaggggggcacggtacttgtgctcaacaacatgttatgaacattctgtagagattacagaaatataaaaaagagaaggagaagaaagatgggaatttatgaagaacttcaggcaagaggcctgatcgcccaggtaacagatgaggagagaatcaaagaacttgtaaataatggaaaggctacattctatatcggattcgacccaacagcggacagtcttcatgtaggacatttcatggcactgtgcctgatgaaacgtctgcaggaagcaggaaacaagccaatcgcactgatcggtggtggtacaggatatatcggagatccatccggaagaactgatatgagaagcatgatgacaccggagcagatccagcataactgtgactgcttcaaagagcagatgagccgtttcatcgatttctctgatggaaaagcacttatggtaaacaatgcggactggctgcttgacttgaactacattgatgtacttcgtgaggtaggacctcatttctcagtaaacagaatgctgacagcggagtgttacaagcagagaatggaaaaaggactcagcttccttgagttcaactacatgatcatgcaggcatatgacttctacgagctgttccagaattatggatgtaaccttgagtttggtggagatgaccagtggagcaacatgctcgcaggtacagagctgattcgtcgtaaacttggtaaagatgcaagcgctatgacaatcacactgcttctgaactccgaaggtaagaagatgggtaagacacagtcaggtgctgtatggcttgacccgaacaagacatccccattcgatttctaccagtactggagaaatgtcggagatgctgatgttctgaaatgtatccgtatgctgacattccttccacttgaagagatcgacaagatggatacttgggaaggtgcacagcttaacacagcaaaagaaatccttgcatatgagctgacaaaacttgttcacggtgaggaagaagcgaagaaagcacaggagagtgcacgtgcactgttcagccagggaaatgctgataacatgccgacaacagaactggaagaggcagatttccaggatggaaagattgatatccttgcagttctcgtaaagagcggacaggcatcttccagatctgacgcaagacgtgccgtaacacaggggggtgtttctgtagacggagagaaagtaacagacattacaacaacatatgctccggcagactttgacggagaaggtaagatcgtgaaaaaaggaaagaaaaacttccgtagagttgttgttaaataattagaaataaatcagaatttgtggctgttgctgtagcaccaaagtgggtgaagacagcaatggccacttctcataaggaggaaacaaaaatggcatttaaagaagtaaagattgaagaactttcatttaacccttttacaaagatcagcaaggaatggatgctgatcacagcaggagatgaagagaagcataatacaatgacagccagctggggtggagttggaattatgtgggggatgaatgtggcaacagcatatattcgtccacagagatatacgaaggaattcgtagatgcagaagatatgtttacactttctttctttaaggaagattacagaaaagcattaaatctttgtggctccaagtcaggacgtgactgtgataaggataaagaggcaggactgacaccgtattacacagacggaacaacagcgtatgaagaagcagatctgatctttgtctgcagaaagctttatgcacaggagatgaaaccggagtgctttacagtagacggaccggatgagaaatggtatccgggcaaagattatcatacaatgtatatgggggagatcgtgaaggttcttgtgagagaataattcttgccgataagatcatgtggggattaggactcgcagcgtcatgtttcagtattacaggacattatgtcggagagggaatatagagaagataggaaagaaacagagtggaggttatacttctactctgtttcttttctaaaatggttgaatatgcaagaagaaaatgttatagtataaaaaaatgaaaataaagttgcaaaggaggtttttatgtgtcgttcaatgaagaaaaaagaaatgcgataaaaaagtacatgttggagaaaataaggaaagatgatgaaaatttcattagaaaaacagcagatacgtttgcggtttcagaaacatctgttagacgctatctgaagagttgtgagcaagaacgcatcatttcggtggatcctgcaaaatattgcgggtatattttgtctacagtagagcaaacatggaacctgaagaatgatggcagcttagaagaagatcgtattttttttagtaatgtgcgtcctctgttggagaatcttccgaaaaatgttttagatatatggtcttatgtatttgcagaaattatgaacaatgcaatagagcattctgaagcaacagaaataaaatactcaataaaaagagactgtttgtatacggaagtatctattttagacaatgggataggcatctttaaaagtattcaggactttattgaaaaagaagaaaataaacagatagacatagaacaggcaatgcttgaattatataaaggaaagttgacaacaaatccatcctgccattcgggagaaggaattttcttttcatcaaagatgttaacagaatttgcattactttcagataatactattttttcgtttcgtagtgaggaaaaggaaaaatttgttcagtcacatttgatttcatactatacaaaattaaagaaggtgggtacaatggtagtaatgaaattagaaaatgatactataaccacatcaaaggacgtatttgattcttttgcaccattagaagaagggttcattaagacattaataccgatgagagaggtatgtccattgggaaatccagttgcaaggtctcaggcgaggagaattttgaagagacttaatgaatttagagaagttatttttgattttaacgggattgattttatgggacagggatttgcagatgagattttccgagtgtttcaaaatgcacatccggatattgttttacgtccaattaatgcaaatgaagcggttctaggaatgatccagcacgttattcgtgcatagtggtttggtaggagaagaaagcaggcggtagaaatgaaagaagtaaagacaatcatactaaaggatgtattaccttttgtggatccggtggcgagatcccatgcgagaagagttttgaaagatgcagaaggatataaggagcttgtgattgattttcgcggaatcgagttcatgggtcgtggatttgcagatgaagtgttccgtgtgtttcaggaagaacatccggagataacgattacgccgcttcatgcaagtacatccatgctggcaatgattcgtcatattggcggaaaacaacaataaattgatatttacatatcccttgtaaaccgttacaataggaagtcggggcgtttgcctcagtgagtggcaaatttacttttgacacttacatcattttatagaagaaaaggaacaagggaaatggggatttatctgattgtatgcccgctggtgtttttggcgggctttgttgattcgattgcaggaggcggaggtctgatttcacttccggcatatatgtttgccgggattccggtgcataatgcaatcgcaacgaataagctgtcatcttcaacaggaacggcagtatcgacagcgagactgattaagaataagaaagtagactggggattcgtaccgggaactgtgatcggagcattgatcggttctgtcgcaggagcaaatctagcgttgatcatcggcgatcgtattttgaagatggtattggttgtgattctgccgatcgtagccttctgtgtgttgagagacaagaacatggatgtggaagttccggtcggaatgacaaagaacaagcagtatctgatcgcgattgtatgctctttggtgattggttgttatgatggattctacggtccgggaacaggaaccttcttgctgcttgtatttaccaagcttgcgaagataccattggagaaagcgacaggaaatgtgaagattgtgaatctttcttccaatatttcagcgctgatcacatttatccttgcagggaaaattatgtggggactggggctggcagcatcctgttttagcattgccggacattatgttggtgccggaatggttgtgaataatggggtgaaagtgatcaagccgattattctgatcgtgctggtgatgttattgattaaggttgtgtctggaatataaaagaaggatggaagcaaaatggaagagtctttgtactcatcctacaatgaaagaagcagaacagaggttattcttcggttctgcttctgtattttttaggggttactccctgatattctttaaatttacgaataaaataactaatattgtcaaacccgcagttgatggcgatatcagatactgacagagagctaccatctagaaggatggcagcttttttgatacggtattcgttcagaaaggcaaagggcgtcttccccatctcctgatggaaataacggcagaaataggttgggctcatgcaggcaatatcagcaagctcttttagggtgacaggttctgtgtaatgggaacggacatagtccagaacggccttgagctggttgattgaggcaagctgttttccggtcgtatcattcagtttcataatttccgtgcggaagcaaagttccaggatctgcagaagagaaatcttgatcttgaggagcgcactttgtccggaatgatggtaattctggataatgtcaaaataagatcttcgaagttcttcatgtttctttggtgaaatggcagcagaaatgcgattcggaaagagaagcttctgctgagtaacaggctggatgaaattatgctggcacgcatcataaacatcaaaattcagaaactttggatcaaatacgatggcatgatgcagagagtggttatgtgcccgaagctcatgaagctcaccggaattgataaagtagaattcactggcctgcatctcataaggtgttccggcaatgatgccatgcaaggttccttcttcaatatagagaaattccagttcgtcatgccagtgggcggtgacagaatagaaaccatttttatctcgatgagtatatacttgcagcggaaacataggagttccgtgagcgttcatttcctttaaagagcgtgacataaataaacctcgcatgaaatcataatattgtgttatttttgaacaaaataatgaaagtatcttttgctttcctgtattatactgggttcgaaatgaaaaagcaagaagggagcatgagatggagaaaaaatggtggcagagcagtgtcgtctaccaggtctatccacgtagttttgcggacagcaatggggatggaatgggagatattccaggaattacagggaaaattaaatatttaaaagagctgggagtggatgtgctgtggatctgtccagtttaccagtccccacaggatgataatggatatgacatttcagattatcgcgcaatctatccggaattcggaacaatgcaggatatggaagaactgatcacaaaatgtcaagataatggcattaaaatcatcatggatttggtcgtaaaccatacatcagatgagcatccctggtttatagaagcaaagaaaagtacggagaatccatatcgtgattattatatctggcggaaaggaaaggatggtcagccaccgaatgacctgaaatcgaattttggcggaagtgcctgggagtattccccggagacaggcgagtattatctgcacttttacagtaagaagcagccggatctaaattgggagaacccaaaactcaggcaggagatttatgacatgatgaactggtggctggatcaggggatcgccggattccgtatggatgtaattgacctgattggaaagataccggatcagaagatcaaagaaaacggtccgatgttacattcttatctgcaggagatgaatgaggcgacatttggcagcagggacagtatgacggtcggagaatgctggggagcaactccggagatcggaaggatgtatacggatccaaaacggaaggagttgagcatgatttttcagttcgagcagatccagctggataagaaagcgggaggtcagcgctgggatttgaaaccattagatctgccggatctgaagcgcgtgttcagcaagtggcagacggaactggaaggacatggctggaacagtctgttctggaataatcacgatcttccgagaattgtatcccgctggggaaatgacggagcatatcgtgtattatcagcaaaaatgcttgcaacattgctacatgggatgaaaggaacaccttatatctaccagggagaagagattggcatgacaaatgttcctttccggacaatagaagaatttccggatattgaaacccagaatatttacaaagaacgtctgaaagccggattcacgaaagaagagaccatgcatgcgatccgtgcgaaagcaagagacaatgcgcggacaccaatgcagtggaatagcacagagaatgcaggttttaccgaaggaatcccatggtatcgtgtgaatccgaactacacgaagattaatgtagaacaggcaaggaaagatccagattccatattttatcattaccagaaactgatcagtctccggaaagagaacgatattatggtgtatggaacctattatctgctattcccggaggatgaagatctatatatttatacaagaacacttggaacagagcaatggctgatcgtttgcaattttcatgagaagacaagaaccttccggtgcaagcaatccgggcaggtattgctaagcaactataaagatacccctgccctggataaaatgacagaactgcgtccctatgaggcagttatttatcggatggaacgcaaggatgtgagtcgtgaagtacacgcacaagatcatagttctgattttgaattcgatattgagttggagtaattccaagagattttcggaaaactttacaaaaatagttatcgtttgaaaatccgaccatcgaagcaatatcaccaattgtgtgatatcggttttgaaggagcagaatacaggatttttgaatacgcagattcgttagatattttccaggagaagttccgtataaatgagtaaattcccgacataaatgatactttgataatcctacggcatcagaaatttcatctagattcagggaaacattgtaaaaatgggtatctatataattttttgccagtgtaacacgtggtgaagttagtttaggatgatataatgcatagcttgttaaatccagaaggaaagaataagcagcttttgaattatcaaataccgattccagctgatttgaagtcgcgtttaaatataaatctctcatttgttctggcaaggtacaggattcatcaaggtgaaaagtgggaccactggactgatgaatgtagtacaaaaggggaaggcattccgtggaaaattctaggtacagtacatcccagtgatctgaatcagacggaagagcgtactggctgtctccgggaatctgaacaagaaacagatcgttagcctcttgaatataggattttccggaaatatgaaaaattccttttccagatagtgtgtattgaagaagaagataagagttctttctagtgttgttatcccagttataatcatgcgatgtaatatggtgtagtccgattccttttagtgtttgaagaggaagggcagaagttatgtggaatccaacagaaccaaatggtaggttggaaaataagtgattgtttgtcatatttatgagttcctttaactatatttgaatttaattataaatgaaaaatgaataaacagcaagaatttaccattcaacgatttacattaccattgaaacggaaagaatatagacgttataatacatgaggtcaggagataaaaagaaaaaaggaggaaccgaatgcagatcattttcgatgaaaaacagcagatttttcatttatataatgagaaaatcagttatgtgattcaagtagaaaaacagcgctatttaaagcactgttattacggaaaaaggttgaaaaagtggcgcggtggcattcagagcttctattacgacagaggattttgtgcaaatccggttgttgaagacaggacgttttcgctggacacacagcaaagagaatttccggaatccggccaaggagatttcagaagtccggcctatgagctgatggatgcacagggagacagaaacgcaagatttttctatcaaggatttcaaattctgaaaggaaagacagcaccggaaggactcccacatgtctatacagagcaggttgcagaagcaatgacactggaaattacgcttcaggacgaagtgagaaaccagagaatcctgttatattacacaatctatgaagatgcggtggtcacaagatttgctaaatggattaacgatggaaaagagccggtggagattagcagattcttaagtatgagcatggatctgccgacacaggggtatgatgtgctgacctttgctggggcgcatgtagaagagaaaaatatgtaccggcgtccactctgtgcagatgcagttgtgatcgagagccgtcgtggaacaagcagtccgcaggcaaccccgtttcttggattgttaagttcacagacgacagaagagcagggtgaagttctgggcgtaaatctgatctacagcggagatttttatgggagtgtccagtgtgggcagtatggaacgacgcgggtacagatcgggctgaatccatttcagttccagtggaagttgcacccgcaggaaagtttctgtacaccggaggcagtccttgtatacagtgaacagggattgggcgggatgacagagatcttccataaattgtacagagaacgtgtctgccgggggacgtacagagagaaagaacgtccggtgttattgaacagctgggaaggaatgtattttgatattaacgaagaaaaaatattgaatttggcagaggaggccgcggagcttggaatcgaactgctggtgatggatgatggttggtttaaaggaaggaatacagatacgacttcccttggagactgggtagaagataagacgaaatttccagacgggctgcaaaatctggcaaagcgggtgaaacagaaaggaattgaatttggaatttggtttgaaccggaaatgatttcggagaaaagtgatctctacaggacacattcggactgggtgatcagaagtccgctttatgatccgatccgcagccggcatcagcttgtgcttgatttgtctaacccggcagtctgtgagtatctgattcagtctgttggaaggattctggaaccgggaaatatcagttatgtgaaatgggatatgaaccgacatctgacggatcttggaagtgtatacctgggcagagaaaaccagatggaattatctcatcgttatgtacttggactttatcatgtgatggaaacactgacggaaagatttccacaggttttgtttgaaagctgttccagtggcggcggcagatttgatgcaggaatgctttattacatgccgcagacctggacgagtgacaataccgatgcaatctgcagattgaagatccagcatggaacaagtttcctgtttccgccggttacaatgggggctcatgtatctgcgtgtccaaatcatcaggtgggaaggacaacaccgcttgctacaagatttgcggttgcggcagcagggaatctcggctatgagctggatctgaaaaatctttctaaagaagagaaagaggaagtgaaagcacagattaaagaatataaaaagaggcgaagaacggtacagtttggaacctattatcgtttggcaaatccattctgtgagaatcagagcgcatggaatatcgtgtctgaagatggaatggaagtaattttcacacacgtgcagatcctcgcaagagcagcatatcggatgccggtcatccggctgagaggtctggacccggacgcaatctacacagactgtgcgaccggacaggaatatggaggggatgaactgatgtatgcaggcatccggataccaagaatcagacaggacttttcaagtacaacaatagtattccggaaatcctgattgagatagaaaagtaagaagttataggaggagctacaatgggaaaagaacagagatatcagaatgcagcaagtcaacttctgcgtctggtaggaggaaaagaaaatgtgatcagcgcggctcactgcgcgaccagattgcgactggtattaaaagatgagagcaaagcagatgtagatggaattcttaagacagagcttataaaaggccagttttctacaggcggccagttccagattattatcggaagtggtacggtggatgaggtgtacaaatattttatccagtacgcagatatcaaagagagttccaaaaatgaagtaaaaaaagatgcagaccagaaaatgaatccgcttcagaaactagtcaagatgctggcggacgtatttgtaccgatcatccctgcgctggttgccagcggtcttctgatgggactcaataatgtcctgacagcagaaggactctttatttcaggaaagtcacttgtggaagcatatccgaatatttctgatctggcatctatgattaatacatttgccagtgcggcatatgcattcctgccaatccttgttggattttcagcaacaaagatgttcggaggaaatccatatctcggagctgttatgggaatgatcatggtatccggagatcttctgaatgcgtattcctatggtacagcaatcacagagggaacggttccggtatggcacatcggagctctgacgatcgaaaaggttggatatcagggaactgtccttccagtacttgcagcagctgccatcctggcattcattgagaaaaaactgcacaaggtagttccagaatatctggacaaccttctgaccccggcgctgtctgtgcttgtaactgcattccttaccttcactgtagtaggtggtgtaatgcgtacagcaggtgactggatcacaaatgttattctgtggttgcatgatacattaggtgttgtcggaggattcattttcggattcatctatgcaccgctgacaatgacaggaatgcatcacagtctgttgccggtagatattcagctgatcgcggcaggaggttctttcctctttgcaattgcagcgtgtaataacgtggctcagggtggagcaacactggcagctatgttctgtgcaaaagataagaaaatgaagagtattgctgtttcttccggtatctctgctctgcttggaattacagaaccggcaatgttcggagtcaatctgaagatgaaatatccattctatgcagctatgttcggttctgctgtcggatgtgcttatgtgacactgatgaatgtccagaatatttccccaggggcagcaggaatcattggatttgtatgtatcaagtccggcggtatgctcaattatatgattggaattctgatctcactggtagtcggattcgcagtgacaatggtactgtccaaacatccgaaattcaaggaagtgtaagaaattggaataatctatgagatacggtgcaatttgttttgacaggttgcaccgtatttttacttacattacgattcaaaatcacatcaccagcctcaaaatccttgtcttatccaaaataaaaatcgaacataccataaatagatgcgccagcagtgtgctgacgatcacgccgttggaagtcagcaagaatccaatgtggaatccaaaccagcagataaatccggagtagcttgtcattaaaatcagaagtggaagttcttcccaaaatccatgaatcgtggaaagaaaatcatccatcgtaaagtcaaagtaaatgaagcgtccgactgcaagtgtgataaaatacatcatcagtgaatcataattatcatcactataaatgaatttaatataaagcagaatcaagataatataaaatgaagacaccagtctgatggaagccttctggttggaatctatttcttccaatggtacaaagacaatatcaagccatccatttaaaatgacagagaaacagaggaaaagcagaagaataatgtcctgatacttctgccagtaaacggatacgccggggatcctctcatcaataatatagtaaagagacagaaaaatcagcacggaggtgctggcgaagaccatctcaaagaaactttcgataatgcttctttttcgctcctggtgatggcggttgatacgaaggattgctttgtgagacagggagtcatcttgcagtcgctggcgtgttttcaatttggctacgccaagaacaataccgatcacaacggccagcccgatcagcgagacgagcaggtagattccgatgtattcaaagttaaagtagtgtgtaacataagttctcattaaaatgccttctttcaaattccttagcaggttataaatagttgtatagctttcattatcaattatagcacggtgatgcaaggggaaaatactggtaactgttcagagccaatactggataaaattcaacctagtcaaacaaaataaactatgttagactatcaatagattgataaaaagataacaagcatggtatctgtcagaatggattgccagtcgtatgtagtgcgagtagtaaccaaaacagtttactagggagtggaaaaaggataggatgagaataatgaaagcaattgtattcgacgtagacgacacattatatgatttatcaaccccatttaaggaaacatgcagggaggtttttccagaagataaagatctggatctggaaggcgcatttttggcaagcagaagatacagcgattccgtgtatgcacgctgcttaagtggtgagatgtcaatggaagagatgtatatctatcgattcaaaaatgcatttcttgattatgggaagaagatcgatgcactcaaggcattggaattccaagcaatttatgaagaaaaacagcatgaaatcaagatgacagatgcaatgagacagttgatgcagaacttgaaagagaaggtgactctgggaatcattacaaatgggccggcgcagcatcagtgggataaagtgaatgcgcttggcgtaacggaatggatcccggtaggtcatgtatttatatcaggagcacttggtgtagcaaagccggataagaggattttcagtcgtgcggcggaaagaatggggattttgcaggaagagatctgctatgtaggagattcttttgaaaatgatatcgcaggggcgaaagctgcgggatggaatgcagtctggtataatcatcgtgaccatcaggcagcaggtgatgtaaagccggatgcagtagtaagaagtgaggaagaattgattgcatgcctgaagaagatcagcacgaaggagtgagcagaacaattagatacaaaaaagaaaaataacagctgtaagagaaatatgtttcaataacagctgttatttttctttttattcgttattcttttactttttcacttttatctttcggcaggatcagactgagcagcagtgatactacgaacacacctgcaacagcatttccgttgaagatatctcccacagcctgtgggaaagcgctgaagaagttcgcatctgtttgtgtaagaccaacgccgacgcagaaagcgagagatacaatgatcattgtgcggtcattgaactcacagtctttgagcatcttgattccttcgtacaggattgaaccaaacatcataacggtacatccaccaagtactgactgcggcaaggagttaaagaaagctccaagcggcgggaacagagatgccaggatcaggatcaaagctcccataaggatcttgaatcggttgattacgcctgtcatagttacaagtccgacattctggctgaaggaagtcagtggcagacatccgaaacatccggaaattgtactggaaaatccgtcaactgcaagagatccctgcagctcttcaatcttaatgtcacggtctaaagatcctttacatactgcagttgtagctccggttgtctcagcggcagaaaccaggaagacaatcgcaattgtaaagaatgctccaaggtcaaatatcggtgtgtgaccagtgaagaatacaagtcttggaaggctgaaaaatccgacttcactgattgttttgctgattccggagaaattgatcattggagcaataccagcaacagtaaagattgcggaaaggatataaccgaagattaatccaacaagaatgttcaggtttttgtatacaccatgcagtaaatatcttgaaaccagacagacaatcagtgtcacaagacctacaagaaggtgataccaggatccaaatgattcggaaccgcttccaccgccccaggaattcattccaaccgggagaagagaaagtccgatcgcgataacaacacagctggatacaaccggtgttaaatatttcttccaatactgggcacttaaaccaacaactccctcgaagataccaccaaggataacggcaccgaccatgccttcatatccgagatccggatttgtacagatcatcagaagacttccaaggaaagtgaagctgacacccataacgatcggcagtttcgaaccaatcttccatatagggtagagctgtaaacaagtaccgattccggctacgaacatggcgcactgaagaagtcgagtgatttcaacagcggtcagatgatcaccggtgcctctgacaagagcagcactgcagacgattaatacaggagcaaggttggctacgaacatggccagtacatgctgtaagccgaaaggaatcgcttttccgagtggtacgcggccgttcaggagatagatattttcttcgctgaaggttgtgatatttcgttctttatctttcatatttacatacccgttctttctagatatttcatataatggttctgtatctgttatacagatccccaaacagaaaccattatatactggttcgcagattgttgtaaatgacgatctgcaaaccttttatgtgattgtagttacaacgttacaattgagtgctgcttctgttactgggcacaaaagctgtgcccagtcatgctgtccccaggcagtgtagaacagcaacccaattcacttttagacagcgtctgcttcttcattttttccgagtctgcgaagcattgtcttcttgactgcacggaaaatgttttcataacctgtgcagcggcacagatgaccggacatcattttacgaatctcatcatctgagaattctttgccggcatttaaaagttcagttgcactcatgatgaatccaggtgtacagaagccacactgaacagctgcttcgtcaataaatgcctgctgaatatcggataactcaccatttggtccggcgagaccttcaagagtaaggatttcttttccctcagcccatacaccgagatagatacaggagttgaagcattccccatcaatgattacattgcatgctccacattctccgacttcacagcctttctttacgctggtcagacggaagtcatctcttaaaacatctgtaagtgatgcacggacatcgatcattttctcaactttcttaccgttgatcgtgcaggtaagtaatttgtactgtttattcatcgatcacacctcctgccaatctgatagattctgtcagtgcacgctctgcaagaacagtagcgatgtgctgacggaatgccttggatgctctccagctgtcacgtggattgatatcttccagaacagcctgaccaaattcatgaacaacagcttttgtaagcggtttgccctttgcttttgcctcagcagaaggtgcacgcatcggaacaggtcctgcaactccgtaagcaattctgacatccttgatcgtcttcttatcttcagagagttttacattgacagaacatcctgttgttgcgatatccattgcattacgcattgcgtatttaatgtaatgtccgtggtagccttcgtatgcttccttcggaatgatgatcgctgtctgaatctctgccggtttcagatcaacgactcctgctttaatatagaagtcatggatcgggattctgcgaactccgtccggtcctgtgatctcaacaattgcatcccatgcatgaagtgttgaagcggaatcagcggatgtaacaccattacatgtgtttccaccgatcgttccgatgttacggatctgtggtccaccaaccatatcaacagcttccccaagtacgttgatatgcttctggatgatcggatcctttgtaatatgagagaagctggtcagagagccaatgcggatcgcaccgtcttcttcataagatatgcctctcatttcatcaattctataaatgcttacaagttcttttcctgcgcgacgtccttcacgcatctgtacaagaacgtcacttccgccggcaatgatctgtgcttccggatgttcctgtaaaagctgtatagcatgagctacgctttcagcttcataaagtgctttaagatcatacatttgcttctcctccttcctcaaacatatgttgttctttcatgctgcggaacagatggtgtggattcaccggtgcatcatttacatagacacctgttgcctgataaactgcgttgcggattgcaggtgcaatagaacatgtcggtggctcaccaagagattttgttccgaatgcacttgtaggctccgcattttctacgaaataagcgcgtagtctcgggtgatccataaatgtggataacttgtaatcgagcaagttattatttaatgctcttccggttttcggatcaaagagcaggttttcagaaagtccgaatccgattcccatactcataccaccgtgtacctgagcttcagcaagtgccgggttgataagagttccggcgtcatgtacattgacgatatcaagcagtttcaccttacacatcgggatgtcaacttcaacttctgcaaatgtacatccgaaggagtaagcattggacttaatctgtgctgtactttcagctgacagatgctcactgtgtgaaaggctgtaaagtgcttctgttgaaagatctccaagagacatcagaacacggttatctgtgatgcgaacaatttgtccgtcaatgatatccagattgtattcaggcattcttgtcagttcatgcgcatatttcaaaatgcgctctttcagaagcagtgccgtctggcggattgagaatccggctgtataagtctgacgggatgcataagcacctgttccgaatggcgtaacgtctgtatcctgacaggaaacaacatgtacagcttcaagcggaacgccaagaatatctgcagtcatctgtgaatatgcagtatcagcaccctgtccgatctctgtctcaccaagctgaacctgaagagaaccatcctgattcaataccatacggcaggaagatgtctcaagtgagattggccatacagctgtgttgtaccagaagactgccataccgatacctctgcggatatctcctgtctggttctggtattctttgtatttacgaaggtaatcagtaacttcgattcctttgtcgaggcactggttgaatgtgtcgctgtataattcatttttagaaaatgcatccttgtatccgaccggcatcaggtttttgcggcggaattcaagcggatccatgttaagttttgcacaaatgtcttctgtatgacattctacagcccacattgcctgtggaattccgtaaccacgcatcgcaccggcaacggatttgttcgtgaatattgtataagcatcagcctctacgttatcacaaggataaagctgcgggaatgcgccaactcctttggcacagatactgtgaccgtgagatgcgtaagcaccctgatcagaaaatgcttccagttttcttgcagcaaatgttccatccgggcgaacccatgaaatgatgtggctcttgatcgcatgacgtacacgagtagaaacaaaggtctcctctcttggtacatcaagtttaataagatgtccgtgaagctgcatggacagccatgcacaaagtggttcatacaaaacatcctgtttatttccgaaaccaccgccgatgtaaggcttaacgacacggatcttaccccattcaactccgagtgcctgaccgacaactcgacgtacgatatgaggaatctgagtagaacttacaaccttgatgcggtcgccttccatctcagcatagcagatgaagttctcaatatgacagtgctgaacggttggtgtgctgtaccagccttctactttgatcagtccaggttctttgattgcttcttcgtagttacctttactgatcgttgtgtgtttgagaatattgtttggatatttatcatgaagctgaggagcatcctctttcatagcatccataacatccagaacaaatggatattcttcatattctactttgatcgcacgaagtgcctgtgcagcggaaacctcatcctctgctacaaccgcagcgatatcatccccataaaatctgacgcggtctgtaagtacaagacgatcggcaacatcctgatgtgattcatctgtggaccatggatgtccggcagttggaaaataatgcttctcctttaaatcaaaacaggtaaatacttttacaactccaggtatcttctcagcttcagatgtgtcaatagaaagaacacgtccgttggcaattgtagagtgtaaaatacgtgcaatataggcgctcttatcacagagatcatctgtatatcttgtacgtccaagtactttatcgtaggcatctacacgagtaactttttttcctacatacatgttatcccctcctaaacataagtttggatcaaccgtttacgtaaaaatcaatatcctgtttcatctgaagatattgggctttggtaatcacgatctttcctttattcagcgtcagaagattcatctcttccagctttctgatatttctgtccaaagttttaatagaaatccccacttcttcggaaatgcgcgctcgtgtctggttaagtaccagaatctccggtgccgggatcttttgttcatatttacggactagatgaaccattaatcggtcttttccttccataaacagatatttcctggcttccgcagtttgcagaacgaggcggctgatattttcctgtgttctcatgaacagtgcatcaatatccatacgcatccactccatataataaatagatggaatggcaagcagccggcattttgttgaagacagaatgctgatccggtatcttggaagtccggcaaaacattcaatctcaccaaagaagtcacctggtccaaagtccttaaagaaataagatttctcatgcatcggccattcgactccggttactttccctgataaaatgatgtatatgtacttgcattcttctccggctttgataaaagtctggtcagcttccacatcaatcacggacatgtaatacttgacttcctccgtacagtttctgaaaagccggttcatatattcctgctttttaagtggtaagctattaaataaatccacgaatcttcctcctcctttttattcattatagagagaaaaggtgatacattaaaaggccatgtgacattttttctccgcttttttgaattatggcgttttggacaaaaaatgactataaattaacaatattataacgtttatttggtgaaaatgacagttggaattgaaaaaatattgatttttgaagttatctacagattatcaacaaaaaagatgagttataaacaagaaacatattgcaattaaaagtgaactgggatattctgagaacataccaattcatgaagttggtgttggacattctttattttaaacatcgcatcaaaataaaagatgaaaaacaaattacaaaactattttccaatgatcagaaccaaaggacaagtgcttgaagaaattcgcaatagcccggaaatgtggaagacattttgtggatgggaagaaaaataccaacaggaatatcttgacatttgcactggggtgaaaggtgtaaaacttctctatgatacctattttaaagttattatgaatccggacactagacctgaaaggttaaatgattttctatcagaaatattgggaagaaaaattagaatcttaaaagtacttccgaatgaatcggcgcgtattgcagcggagagctccttattgattatggacattgttgttcagtttgaagatggtagtatagcaaatgttgaagtacaaaaaatgggatatttatttcccggacagagaagtgcctgttattcttccgatttattgttacgacagtataaacgagtgcgcgcagaattaggaaattcatttacttataagagaattcagaaagtctatacaattgtattatttgaaaagagcagtgctgatttccgcaggttttcgaaagaaatatatattcatcattgcgaacaaaaaagtgatacaggagtagaagtgaatttactgcaagaatatacttttatatgtcttgacatttttggtgacatcattcaaaatgaaaacagaaagataaaaaatagattggaagagtggctcgtatttcttagtcaggatgatccggagatgattattaaacttttgaatcagaattcggattttcagaagatttatgaagaaatctatacactctgtcttaatatggaaggaatgatggagatgttttcgaaagaacttgagattttggatcgcaatacagtgaagttgatgattgacgagatggaagaagaattggcacaagtaaaggcaagtgttgcaaaacaggtcgaagaacaagtggcagagaaagtagccgaacaggtggcagagaaagtagccgaacaggtggctcaagcgaaggagaacattgcaagagaattagaagaagagaagcagaagatagaagaagaaaagcaaagaacggaagaagaaaaacaaagagctgataaagcagaagaggaaaatatgagattaagaaagaaattgatggaattgcaaaaattgtaataaggtagatacgaaaaatctaaagtatttagaaaaatttaaatttgtgcttgcatatctctggcatgtatgataagatataactcgtgtcagagataacacaagacacgcgggtgtagttcaatggtagaacaccagccttccaagctggatacgtgggttcgattcccatcacccgctttttttgtacccattttgaactgttcagagccaagcggatgtttagatgaaatgtgcagcatttcggaaagtggatctggatggtttattttatttataatagaaggaggacgagaacatgaaaacagcaattacaatcgccggaagtgactctagcggaggagcaggaatccaggctgatatcaagacaatgatcgccaacggagtttatgcaatgagcgcaatcacagcattgacagcgcagaatacgacaggcgttacttctatattaaatgcaacaccggaatttttaggacaagagcttgacagtatctttacagatatctatccggatgctgtaaagatcgggatggtttcagataaagaactgatcaaagtcattgcagcaaagctgcgtcagtatgaagcaaagaatattgtagtagacccggttatggtagcaacaagcggagcaaagctgatcagtgatgatgcggctgatatattgaaagaggaattatttccacttgcaagtgtactgactccgaatatcccagaggcagaagagttgatcggaagaaagatcacaagtgcagaagagatgatcgatgcggcgaaaaaaatttcagaaaaatatcactgtgcagtactttgcaagggtggacacaacttgaatgatgcgaatgatctgctgtatgcagatggagtgtatcgctggtttaacggaaaaagaattgataatccgaatactcatggtacaggttgtacattgtcttctgcgattgcttctaatcttgcaaaaggattctcattggaggagtctgtagagcgtgcgaaagagtatatctcaggggcacttgcagcaatgcttaattttggaaaaggaagcggtccgatggatcacggatttgcaattaaaaacgaatatacaaaagaagcgaaagactgatcaaaagcccttcgctttacatattaaagaggagaaacctaaggagtagcacgaagcatgatctttgcggtaaagactccattttcataagtgaaatcacaagaaccatcgttcttttctgctgttctgcggacggattgggtaccaaccccaagtcccgttcgcttggtggaatggaatagatggtctttttctttgatatttccatcaaaattattctcaacccgaattaaaagaatagaagcagaatgttgatagatttccaacgatatccgctgctgcgcagcggcagttttgcgactggcttccaatgcattttctaatagattggaaagaataagacagagatccatttcatctacggaaagttcttttggaagatcaacacgggcatcaaatggaatttcttctttttgggcaagtgcataataatatccgattacgttatcaacagactgattttcacagaagtgataatcaagggtgggaattttatccaatgcattttgcaggtattttttgatcttttctaaatcaccgtctttggccatagcagatagttgtataaaatgatgacgaatatcatgtcgagcctgtctggcttcttctatcgcacttcttaaattctcatatcgttcctgttgtacagaaagaaaaagattttcctgctgaagttttttgtttttattcaggatattagccatcattaaaaacatcgagtaaaataatgcaaggatgagtagaagagcataaacaatcactatgtatccacgcagaaaacgctgtgtgtgcaggatggtgttatattttggaatcaaagcaaggttcaatccgatgaccagaaccgggagaatccagaaaacataccaggtctgagcaagattttcatcttctaccatttctttgacggaatgggaggctggataccatatgagaaggacgaaaagaatgcagaaaagattatacaggattccaaaagtagaaaaatcggaaaatgcaaggtgttcagaaccaaaattcaacattgcagaagcagctctggaaaggctgttaaagcaagaaaaaactgcacagacggcaagatagatgctgacagatttccaaagtgaaattaacaaagtgctatgatatagaataaatagaacaaataaaagaggaagaagaacagatcttgttgacaaatgaaatctatggcatgcaaaaccacaaaaacaagaacatataataagaagcggaagtatccagacagccagcttcttaggtgtttgcttcagagatgatcttaccggcagataggcaagcagcataccaggaatcaaaactgtaaattctaaagtctggaaaattaaagtccacatcaaaatccccccttttgaaatagataatccataaagtgttgtcgtgcaggtttgcacagttctctgctgacaacaatcttgcttccatcgtctaaaagaaacattgttccgtcaaaatcaacagcatgttccatgttgatgatcgtccctctgttgcagataaaaaagcgggaatcttcttttaatggagcagtaaaagtcccaaaagactgtcggatgacaagttctttttcttttgttgtatgaatatggatcatatgagaaaaatgatctgcgtgaacgatcgttttaaatggtatctgaagatcacttccatttacttttactgtcagttttttctccgaagccggaatccgggacaggatttcatcgattaaagaagccagttcttcttccatataaggttttaccagataatgcatggcacgtactttaaaaccttccagtgcatgatccagagatgttgtagtaaaaatcaacagacagtctttgttggtatttctaaattcacgggcgatttcgattccatttgccccgtccatataaatgtccagaaataaaactgtgaagtcatgttcttttgaagccttgagaaatgcttctccattctcatattcatagcaatgaaactctacatttttctgatttaatatattttctaatcgtgttcgaagcagaatacgctcttctgcaatatcatcaacaatagcgattaacatacgaatatcctccctgatttgtatctattcaaaataaatacaaacgttttgacataggattagtataccacagaatgacgattcgtgccattttcagacagttcatgtcaaaaatattgaacaatctggtatcaaaaatataataagaagaaatatgattgccgataatatagcaaaatacaaatgaggaggaaaaacggatatgaaaacaataaaaaagataatggcagcgctcatatgtatgacgatagcacttacggggattccaatcagtgtaaaagcggcagattcaagtggaagtatgtcaacagagatggagataaatagtgaattatttattacactagaagagaacaaagactatcgctggaacgtaaatgataatgcagggaaaaatagtgttgttcatttggatacttcagaaggaaataattgtcgtttccgtttagatcatatagaaaaggaatggtatgggattaaacatattaaagtagatggaacggatcgttttgcagacgtggatggtaaaagtaaagacagcggtgcagtacttcatttatgggagtcttcagacagtgaagtaaagggaaataatcaccgccagtttgccttttattatatcggtaatgatgcaaatggaaatgcgagatactatattaagaatagaaacagtggaaaatggatcggatatgaaggaaaactgaataataataatccgaaaatcatccagacagatgagagcaacagaaaagtctggctgatcacaaaatccgtagttccactcacgggaaaagaaagtcaggttttaaaagaagaagatacaagtgctatttgtgaaattcatgaagcaggaaaacttgatgctttaaatagagtaagcaatctgtcagctccaggatctcatccaacatttcaagtaatgggaataaccagtaaatggaaattgaaatggaaatcagagtatcatgcttatcaaatagatgcggtctctgatggtgaaagcaaaacgaatctatctttagatgtagaaggagaatctggaaaacttaatgcaagtgtgaacgtctggacgactgaaaaatttgacaggaatcagaatacaagtcaattgtggcgattttttaagcagaaagatggtacgtataaaattcagaatgccagaactggatggtatatcgaaaatagcgtcccaactttagtgtttgggaaaaagggaatgaatgtagagttatctattttagcaggtaacacagctgcaacagcttacagttatgcgaatgaatggatggcaggcattccagatgaggcactactgtcttctgttaatattccggcaacacatgataccggaacagcaggggttgtggatgatttagttccaagtgtatccattacatcctgtcagaatctttattatgatgaacagttaaatatgggagcacgcagctttgatatccgtgcaaatgcgacaaaagatgatgcttctgcagcagacgtaaagattgtacatggaggcgaattatggcagtgtcaggaaaaaaatggaagtgatcttacattacagtcaatcctcaatacttccctcggtttcttagagaagcataagtcagaaacagtcattcttacagtaaaatcagatgccggttctacaattggattagagcatgcggtagctgaatttattgaaaaaaataaggacaaggtctacagtggaggggatatcccatcaatgaaggaagcaaggggaaaaatcatatttcttcgaagatttaatctgaccaagaactacgacagttcggttgaacgtgcgatgggatttaaccttacgaattgggatgacataaaatataaagattataaatatgcgtacaagttatatgatgatggaaaaaatcatgtgtatattcaggatgcatataatacatatggaagtgagaagtggccgtatatattagaaacgatgaagcagacaacaggacaggatacaagccatccgatcgagtacaattcttgggtatttaattatacttcttgctcacaaggagcaccgttaggattgacacaggaaattaatccgagattatttaaagacgaagacaattgtattgacaaccgattccttggaacagtaatgcttaactttattgatgaaccaatgtcacggttgatctatgagacaaacagcaacatgatatttgaaccaaagcttcctacaccggaagtagaagttgaatatggtcagacattagcagaagctacattgaaagggattgaaaatgcaccggcaggaacatggaagtttgaagatgcagctcatgttgtgacagatcaggaagtagcggatcagaccaaatttgaactgactttccagccggcagataataaaaaatacaaaactgttactatgtgggttccggtaaaaacagtgaataagtcagaagtgatcacagcctatctcggatatgaagaaatttcctatggtgaaactccgaagatgtcatacgttgttgcaccaacagaaacactgagtgtagatgaagtggaagaactttttgcaaatgttacggatgaaatgagaatccaggagacaggacagtcattaaatgagacaatcgatgcaggaagctataagattgattgtccggaaacagtaggcggattcaaggtgaattggattcatttgaaagaatacgatcttaatatcaatccagtgaacacaacagaagcaacaggttccaaaagcagtacagcagaaaatacgacattagaaaatggcgcagttagtagtgcacagagaatcgttgtccgtgcagaaaagaaaacaaagacatatggagatgcgttgaccagtgcagatcttacatttacgatcagtgattcagaaagggcgaaacttcttccgggagatactgttgaaagtctcggactgacattgaaagcaacaaccatcgaaccggaagatattctgagaggaagcacaacagatgcagatggagatgacattcttggcgcatatggcaatgaaggaagatatgtcatcctgaaagataatgtgacaaatacaaattatgatgttgtagttcttccggcattccttaacgtatcaccaaaggaagcggagatagaatggaatgcagcggcacagtatacatatacaggaaatgcatgtggaatagaagcaaacgtgaaagcagacagccttttggaaaatgatagctgtgcaattaaaaaactgctgaatgcagatcatacagaagttggaaattacaaggcgcttgcaataggtctgaccaatgaaaactatatcttttccggcaaaaaccgcgtgcatctatgggaatatgagattttgcaggcagatccggaagtgactttcccggcagcagaagtgatttatggagacagcttaaagaaagcaacactttccggtcagtcgggagaaggtgtattccgttttgcagacgatacgacaatgcttacagtagcagaggatcaaagtgaacaagagatgatcttcacaccggctaatccgaactacaagacagttacatcaaatattcctgtaacagtaaaatcaagaagcattacgatcagaccggaccgtaaggagaaagaatatggacagacgatcacagagtatacctggtcgatcagtgatggaagtctggcaggggaagacttactggatgatctgaatgtgaatgtatcactgacagcaggagatgcagagaaagagagctgtgaagttggtacttatgaaataacagaaaaggctccaacaacagtagaaaatcaaaactatgtggttatatttgaacctggaatattgatcgtacagccaaaaccggtagatgttgtatggaatacagacggaactatcatctatacaggaaaagaagtgaatgtcacagcagaattatcaggagtactgtttaaagatgaatgtaaggcagtagtagaagatggaaacgctgtggaacctggaaaatatacagcaagtattgtcggattgacaggcgagcaatgttataattatgtgcttcatggagatgatgatgagtatcagatggagtatcagatcgtgaagaaagaagaaacaaagaatccaaccgattcaaaggaaacatcgacaggtactgcaggaaagaaaccaacaggaacttcagcgtcaggaaaacaggtgaaaacagcaaagacaggagacagcatcagctacctctggattctgatgattgcgggatcaattgcagtgatcggtggaatgatttatgttattagaagaagaaaacagaagtaaaattaaagtgaatctataaacgatagatagaaaggtgtcaggcatatggggaaggtgttattttaagcttcggcctgacaccttttattgaaaaaaaggtgaaattagtatattatgaaaacagatgccgtatatcctaaacatgcaataaaaagtgcttttgaccgcatgcgttgagagaaaaaggagggtgaaaatgagtgaattaagtaaaaaagcaagaaatagaacaagagtccaaatggtactgactatgttggttattgtctccattatcagacaattctttcttggaaactatcacaatatgtttcttggaattttaacattgattttatttatggtaccacagtttattgataagaaacttggagtgacaattccggttggcttggaaacggttattttgatctttatcttttcagcagagatacttggagagatcaatgcattttatgtaaagattccggtatgggatactattttgcatacaacgaatggattcctgatggcggcaatcgggtttgcgctgattgatttattcaaccgaagtgatcgattttcaattaagatgtccccatactttgtggcattttttgcattttgtttttcaatgacagttggtgttttgtgggagttctttgaattcagtatggattggtttttcggattggatatgcagaaagactggatcgttccggcaatcaattcagtgaagctgaatccgacaggagcaaatatcccaatccatgtagatgtccagtccgttgtgatcaacggtgagacttggaatctgggcggatatttagacattggaatcgtagatacaatgaaagatcttatggtgaattttgtcggagctgttgtattttctgtaattggaattttatatttgaaacatcgtggaaaaggaaaactggcagcttcattaattccgcaggtaagagatacggatgcagaaacgtctgaaaaatagaaaacgtaaagataagaaaaaagtggaaaataaaaattccgttgagtgaaaactcagcggaatttttttaccctttttgagatgtcttccagttcttctttggaaagctccgggagacgctctaatttatccaggaacatcattgccgtttcacgacgctgcatctctacgatctgtccgtaataattgacaacaacaccggtaacgattgcaacaacaaaaatcgtgtagattgtgacgagtacagaaaccagtttgccaacgaaagtcattgcgacaatatcgccgaatccagcggtagaaagtaccgcatagcaataccagagggcatcaccatagcggttgatgtcgggctctaccagctgaatgatggcagcggatacaaagagaaatacgatatagccggaaagaatctgggttgctttggtgcgttttaggatcatccataaaagttttagttttttcatactttccccctattcagaattccgttgaagcggctcatgaatgtgattgttgtgatcgcggctgcaacaatatcactgatcggttctgcaagaaagactgcaaataccttatcctgaataaagagtggcaggataaagatcagcggaatcagcaggatcagttttcttaagcaggcgagcagcagactgacctttgcctgtcccaatgccatgaaactttgctgacatgcaacctggaatccgagggagaaaatacccgccatatagattctcaatgcccatgcggtataagtgatcagatccgtattattggaaaagattcctgcaaacagcttaggaaacagtagcatgatcagccagaaacaactggtgaaaatcgtacaaaccttaaactgtgtaaagaaggctttttttacacgctctttattgccggcaccgaagttataactcatgattggctgaccaccctggcagattccctgcagtggtaatgtagcaagctggctgacacttgtgatgatcgtcatggctccaacagcaaggtctccaccatatcttgacagactggaagtaaagctaatggacagaatactttctgtggacagcatgacaaaagtggaaatgccaagtccaagacaaggcaggataacgtccttttgtaatctgaaattttcttttctaagatgaaggatcgtcttctttccggataagaagcgaagaatccaaatcgcaccgacagcctgacttaaaacagtggcaagtgctgcacctcttacaccgagatggaatacgaagataaaaatcggatcaagaatgatattgatcacagctccgatcacagtagtcatcatactgatcttggcaaatccctgtgttgtaataaatggattcattcccattacgattaagacaaagatacttccaaggatatagattcttgcgtatgttactccatacggcagtgtcttctcgctggcaccaaaaagtgtcaacagctgtggcgcaaatgtaaagaagactacagtaagtacgacagccataaggatgagaagtgcaaaacagtttccaagaattttttcagctgttttattatctttctttcccatagatatcgcagcacgcggagcaccaccggaacctgcaagcatagcaaaagcgttgatcagcataaggatcggtgtaaataatccaacgccggttaatgccgcggctccaacaccggaaatgtgtccgatatagattcggtctacaatgttatatagaagattgatgatctgggcgacaaccgcaggaattgcaagctgtgccagaaggcgtgggatcttttcagtctccatcgcctgagaagtcgatttgctattcatatctgtttactcctaaatagttttaaaatcaaagaagattatacatctcatgtaatggaaaaatcaataagaaatcaaaaattacaggcattcaacctaacgaaatcgtgatataatgatataatcaaaatatatttgaatgagaaatatggaggtagcttatgggcgtaagttataacagattgtggaaaatgctcatagataaaaatatgaagcgaatagagatgcagtacctcaccgggatcagtggaaacattcttgcccggatgggaaaaaaccagtatgtatcaatggagacgattgagaagatctgcaagaaactggactgtaccgtggatgagatgatggaatttacagatgatgagtaacaggagcaggtatgtcaaattattaaaactggcagaatgcgtcagaagtcgaaaaaagaaattgaaaaaagataacacgccggatacggcataattctcttagcaaagctaagagcgcacttctatacaggcaattacatttgcctgtatcgtgcgacctgcggtgctatccctgatttgggaaaatctcaatccgggaattaagcgaaatcagagatttcgtacaagggaatggattcccttgcggcacaggtgcctatccctgaagtttgtgagtgaatacctcagatacaaacatatggggtgaaagaaagcgtgaaatcggaatttcgtgggaggtgttatacaaatgaaactggcagacttatcaactggaccagactgggtagtatatgttggatttataatatttgctgtactttccatagttttgatttctggacatggaagttggttaatttccggatataatacagcttcaaaagaagaaaaggcaaaatataatgaaaaaaagctatgcagaacaatgggaattggaatgtctgttatagcaattcttctattaagtatgggagtgtttgaaaatattttaccagcattttttgtgtatattgcattgggtattattttagctgatgttgtgataattattgttttgggaaatacaatatgtagaaggtgacaaatttcgacttgtggactttaacaactcggtattttggaggttattatggcttttgattttaagaaagaatttaaagaattttatatgcctaagaataaaccagagattgtaaatgtacctaaggcaaattatattgcagttagaggaaaaggcaatccaaatgaagaaggtggggcatatcaacacgcaatcagtattctatatgctgttgcatacacattaaaaatgagttacaagaccgattataaaattgaaggcttttttgaatatgttgttccgccattggaaggtttttggtggcaggatgatgttgtgggtgtagattatacaaataaatctgctttcaactggatttctgttattcgtttgcctgatttcatttctaaagctgattttaactgggcggtagaaacagcaacgaaaaagaagaaactcgattgttcgtcagcagaatatcttacgattgatgaaggattatgcgttcaaattatgcacataggttcttttgataatgagccagcaaccgttgctcttatggatacttatatagaacaaaatgggtatctcaatgatattaacaaagatagattgcaccacgagatttatatgtctgatgcaagaaaggttgctccagataaatggaaaactgtaattagacatccgattaagaaagcgtaaaatcgggatttacttctacttagacatacaaactgttgacagtaaaactcctatatagtattatttggtaaaatactatataggagtttttgtatgaaaatgaatggcggatttcttgttaccaaaataaaacaacttggagatcgaatctttgagaagattctcagcgaaaagaatattgatgcgtttaacggagctcaggggcgtattctttacgtactgtggcaggaagatggaatctcaatcaggtcactctcgattaaatgtggattagcgataacttctcttactacgatgctggaaagaatggaaaatcaagggctgataagacgcgttcagtctgaaacggacaaaaggaaaacacttctgtttctgactgaaaaagcacatgccttaaaggacgaatacgattctgtatctgataaaatgggcagtatttactacaaaggtttttcggaggaagaaattacccagtttgaggaatgcctcgaccgtatcagaaagaatcttgaggagtggcagaaatcatgagtatttgtatcaaagatcagattcaaaacatgaatatcgttatcggatgtacagtggggtgtgcatattgctacgcccgcaataatgtgaaacgctggcatatgattgatgactttgctgaccctgaattctttccgggtaagctcaagatgatggaaaagaaacgtccgcagaactttcttcttaccggcatgagcgatctttccggctggaagtcagaatggagaggcgaggtatttgaaaaaatccgtgaaaatccacagcatcagttcctgttccttacaaagagaccagatctgctggattttgatacagatttggaaaacgcatggtttggtgttacggtgacgagaaaagcagaactgtggcgtattgacgaactacgggaaaatgtcagagcaaaacactatcatgttacctttgagccgctattcgacaatccaggttcagttgatctttccgggatcaactggatcgttgtcggcaccatgactggagttcagagcaggaaggttcatacggagccggagtgggcatggtctctgacaaatcaggcgcatgtgcttgacattccggtatttatgaaggaagatcttgtccctatcatagggaatgaaaatatgattcaggaaatgccagatgaattcaataaagtgttggaggtacagagatcatggcagaagtaataaatggaatcctcattaatgaggcggaaacaaagaacatcatgaccaagtccagtctgcctgtaggcggttactcggtcaatccatatgtaggctgtacacacgcctgcaagtattgctatgcctcttttatgaagcgctttaccggacacaaggaggaatggggcactttccttgatgtgaagcattggccggaaattaagaatccgaagaaatatgccggacagcgggtggtcatcggttctgtgacagatggctacaatccacaggaggagcaattcgggaataccagaaaacttctggagcagctgatcggcagtgacgcagatattctgatctgcacaaagtcggatcttgtggtacgggatagtgatctgctgaagaagcttggacgagtaaccgtttcatggtcaatcaacacactagaggaaaatttcaagaacgatatggactctgcttctagcattgagcgccgtatcgctgctatgaagcaggtatatgaagcaggtatccgtacagtctgtttcgtatccccggtattccccggtatcacagattttgaagcaatctttgagcaggtaaaggatcagtgagatctgttctggctcgaaaatctcaatcttcgaggcggtttcaaaaagacaattatggattatatcgctggaaaatatcctgatcttgtaccactttatgacgagatctataacaagcataaccgcagctactttgaagcacttgaagtaaaagctgaggaaatggctaagaagtatgattgtccctttgtggataatgaaatgccttatggcagagtcccgcagggacatccggtgatcgtagattatttctatcatgaggaaatccgagggacagagaatacaggaaaaagaaatcgttaatctaaacgaaaattaaactgatgatggtggagagatttatttatcgccatttgaaatcgagaagttcttgtttgaaaaatagagaaattgtaaaattgaagaaaaaagaaatgcacagttcttagcttatcgggagctgtgcatttttgtaaataaatacttttaattagccgattacggcgtcctctgctgtaaaatgttccagagaattttcttttacctgaatgcagatataagtaattccggaaatatcggatgcaaaaaactgacgctttgcagcaggtgcgatttttagccagtctccagttgaaaggctgatttcttctccatcaattatggctttgccgttacctgaaagaattccatagatttcttcattttctttatgagaatgaacaaatgggacatttgctcctgcaggtagttcgtttaaactgatttctgcacctgttaaagacaacttttcatgcagctcaattcggttttcctttccaatagttgtttttgtgtaatttgtcataataatacctccatagttgatttgtagtttctaattacatggcattagtatagtgtgagacacatacaaaaacaagtacgcacctttttgtaactgtacactcaaaattgaatgtgttacaatcgacttggaggtgagaattatgcgagcaaaagaagaattaccggaatgcccagttgcaacagcagtatctctcatcggaggaaaatggaaactgctgattttgcgtaacttgaaagagcgtccatggagattcaatgagctacaacgaagtatagatggtatttcacaaaaggttttgacggatagtttaaggcaaatgatgagtgatggactggcatatcgccacgattaccatgaacagccaccgagagttgaatacggattaacggaactcggaacaaaaatgcttccaattgttaattcacttgctgactttggtaactactataaatcacttattgaacagaaataagtacgttagtatttgaaaagctcgaacaatcgggatttgaaagtgagatgtattttatgaaaaagaagattatattaacaatagcatttgttattagtttattaccaatgttattaaaccaatatggtggaatgaaaggtgtacaagagattagtgcttaagttaaaagacggatttgttctctatcatggaagttattgtgaagtaaaagagccagatcttgccaaatgtgcaaagagaaaagattttgggcagggattttatttaactacatccaaggatcaggcgataaggaagcagacgatttctgcatcagacagttgctgcccaataaactaaaagatcaatattgcttcaaaacagaagccgctattaagtgtctgaaatttgtgaaaggacggaacagagaattatcgccgcactcctgaaacggtcacaatggaaattcatttcaatttaaaaccaataccggagcttggaaccatcgaaagaggttccggctcccataaattagaaaatctatcaaaatttaatctattttaaccttttcaaggctcatttcgagccaatattttaccatatatgcattacatgctgcattgcaaggctgactactgtaattccaacccagcaggaagcaccgagaaggattggctttccaccagatttgattagtttcacaacattgctgttcagaccgatcgcagccatagccatgataatgaagaatttagacagttctttcagcggagcaaatacatccgcacttaccccaagactcatgcatacagttgtaatgacagccgcaatgataaagtacaggatgaacattggaaatgctctttttaagctgaacttaccggatgctttgccgtcttttgcggctgattttgcacgaaccagtgagagcacaagtgtgatcggaatgatggcaagcgtacgtgtcagtttaactgtgacagcagtattaagtgtctcacttccaagactccacatgctgtcccaggtagaggcggcagcagttacggatgaagtatcattgatcgcagttccggcaaagacaccgaaagcatttccgctagttgtgtcgaagccgagtgcatttccaagcaccgggaaaagtacagcagcgataacattgaagaaaaagataacagaaatcgcctgtgcgacttctgtgtcatcggcgtcaatgacaggcgctgtagcagcaatcgcagaaccaccgcagatggaagaaccgacaccaacaaggatagatgtgttggaaggaacgttcagtaccttgcggagcagccatgcaatgatcaaagaggtagaaagtgtactgatgataataggaagagactgctttcctgtctgtaagataactccgagattcatgccaaatccaagcagaacaacagcagtctgtaaaataattttagatgtccatttaattcctgattcggctgttcctttttcagtccaaaagcaggtgatcaccattccggcgagaatcgcaatgacaggtccgccgattaccgggaatgcttttccaatcagccaggatggaatcgcaatcagaaagcagaccagaattcctttgaaatttttttgaataaaattcatgatagtttcctctcttaagttttttgttactgtcggcactatgggcgtcagcaactgtatttttatgaaacaattatagattataacactgataaacaataaaaaaaagtatataaattctactatctataggatgaaggtgtctgtccggttttctttttaaaacaagaactgaagtagtattgatttgaatatcctactttcgcacttatttcttttagtgagaggttcgtatttttcaatagattacaggccgtttcaatccgaatatctgtgattacatccgaaatattttgctggcgttgttttttaaacagagcactaagatgagccggactaatatgaacattgttagcaatttcatttagacataaggtgttgtcttgataatgttggtgtatataattgatagtagcagtacaaacatgttcttgacgactctgtgctgaaagattaattttatcagatattgtctggcataaactagaaagccattggaagatctcagtacttgttgaaaaagagtcaaggtgttgataggttttaataatgtctttttccatgtcattgcttctaatgcccatatcgcagagaaattttagtaaatgccccaaaagctgatagatacgtataaatataaattgtttgtttttgtagttttgtgttaattcttctgaaaatgaaagaatccacttttctattccgtccaggtcattttcgcataaaagctgtattaacttttcgtgaccggaaacttcatataattcagcagagtaatcgttgtctatagtatcaccaagtgtaaatatgtttttctgtggaaagaaaaaacggtattccagtgattttaatgcattggaatacgaaacagataaagtccacaagtatttgacgatgtttcctattccgatatttaattcgaaaaagctgtttttataaagttgcaataattctgttaacagatcataagacgtattatagaagtatttctgattagaataattgtgagcgattaccaatacgatttcgtcaaaacttgttaaagtatgaatcagtgaaaagtgctcattgaaaagttcttttatggtatcagacatactcattagttttatgtgatactcttcaatgccttttttttctttgatgtctgttgcattttgtatttgaattacaatggcctgataatagtgatagtcaagattcaactgaagataatcggcataatttgaaagtgtatatcgagcttcatcacttgaagattgtattaatttatgaaaaaaattatcgatcattatagggcggctttgttttaatatttcaagattcctctgttctttattaagcatactaagagcattgcgaatgattttctttagataagaataatcaagcggtttttctatatagtcaaatgcaccgagtcgtatagcttgtttggcatattcaaatttatcaaatgcactgataagtattatttttatagatgaattaatctttagtgcattttgtgcaagagataaaccgtctaattgtggcatttctatatcggaaataattaaatcaaccatattattttgcagataatcaagagcctgctgtccatcataggctttgcaagcgacttctgcatttaaatcagaccagtcaatgttgtggcaaataccatcaacagatatatggttgtcatctataatcataattttgtacattagtagtcctccagtaattgcggaattcttatataaattgtggttccagtatctttgttgctttcaactctgagtgtaccatgtccctgtaaagaggaacatatacgtgaattaatgttacttataccgaaatgtttttcgtagtgaatttgtttggaaacaataccttcacggagttcatttagtttctcaggagacataccaattccattatcagaaatcatgatttctatcatatcatcatcatatctaatagaaatatcgatatgcatatggattccatttcctttaaaaccatgttgaatcgaattttccaatataggctgtagtgtgaacttacaaataagaaagttttctattccttcttccatatctatattccaatcaaataaattatctttacataatgcttccatttccatatataattgtgcaatttctaattcttttttaataggaatcagatcattggaggtgcgtaacaatcctttataaaaaagcgataaatcagcaagcattttattcgctttcgtgatttcaccaaatgacaacaaattttgaacagatgctaaaatattatataggaaatgaggattgatttgtgattgcagcaactgataatttagtttttcctcttgtatttttaattgaaggttattctcaaagcttgaattcaattctgaaatcatgttagcacaggtgacggttagtgaatctatttcatccaagtgagttgaagaagatggaactaacttgtcgatctgcgtcgaatctatgacatcgtccattttgatttccgacatagaatgagacaaatgattgattttatttgtcatttgatcagccacccagataattgagagcatagtcagagggacaataatcatgaaacaaatgaaaatcatttttacgagaaaggatgaactttggcgtatataataatcaggagtttcagtaacaagaaatagctggttatgtaccggtgtggaaattatctcacatttatcatatgagaaatgtgagagtctcaagttttgtgtgattgcatgaagtttttcattggataaagaacccccaatttgtttcttatctgtgcttgataatacaacaccctcggaatttattatataagaaagagaaggattgccttcagaaaatgtgtttaagtagttgcttaattcttcacttgttatgtgaacagccaaacaagttttttgtgaattgatttttgcatacctatagcaggagagtactccggaaggttcttcacctttgctgaccatataagggaagttaatgtctttgcgaaaaatccaattaggagtaagcccctgttttgaaaaatcgctcaactgtaccttatattttttaagatctgataaagaacagaaagtaagcccttcttttgaagcaaaagtatcatcaggtaaaaagatatttacatgataaatattaaaagaatcagctattgaagcaatattattccgaaccgcagaaagtttgtcgagataatttgacataggttgctctgctgttgtacataacatacataaattaaaatgaatagaatcttctaaattttctatttgagtcattcgattttcaagcaggtgctgatttttttcacaagaaattgctgtttctttcagaatcttgtctttagctatattataagatattttataagatattgttcccaatataagaaggggaagtatggcgcaaagaataaagcaaatgattagttttaagcgaaagtgttcttttatagtattgattagtgacgtaaatagcttcatattatggaaccgctcctttcagcttcattctaataaaagaaataataaaacgcaataatttgatttgaaaaataaaaaaattataaagtatgcgcaaaataatatatttatttttaaagcattattttctatgatgatattaacaaatagttgtagatattaggttgcatattaaaacgcaggagggaaagaaatgaaaaaagaatagtcagtgtattacttatagcaacaatgtctgttggactttttagtggatgcgggaagtccggaggaaacacagaggttaagcagaacgagaattcaaacaaaatcaccttgatgacacaagatacaacttatggaaaagcttttgatgaatatatccataaagcggaggaagcaacgggactggaaattgaaacaatcgcatgcccgacaaatacagatgatcgtcaggcaaaaataacaactatattatcttcaggtgatgatagcattgatgtcgttacaattaatgatgagatgatgagtggatttaaaaatacaggttatctagaaccgcttcaagacaccgtcatgacaccggagatcatggaaaattttccacagaaatatatgcaggaaatgacaatggtaggagacaatgtttattcagttccttgctttatggatgttcttgctttctgggttgatgaggaaaagatggcaaatgcaggtcttactgagattaagacaaaagaggattttgaaaaatatgtagaagctaattcatcggacggtaaatacggatatggagatgcgtgggaaaaaacatatgtatttaactctatcggaacatttgtgaatttgtttggtggagactactacgattggacaaatcctaaaactcaggaagctgtaaaattcatgtatgatatgatgaagaaaaaagagacacctatttctcagctggcagatcagtacgatccaatgatgcagaaattttttgatggagaatatgcttctatctttatgtatgtaggagcaatacagtcttttgttaattcaggaaagtatggtccggataaacagcatattgcccctatgccgacatttgaaaataaggcagcttatatttctacatggggatatgttttgaatagtgcttcaaaaaataaagcagcggcgcagaaattcctcaagtatgctgcaagtgagcagggagaacttgattatacagaaatgacatccagacttccggcaagaacagacgtgttggaaagtgatgaattagcagcaatggatttgcctggtttagatgaaataaaagagtacgtggacaatacagaacttcttgcacgtcctatggcaccgcaggcgatggagtttattagtgagatgggatctttattccagcagtatgtatctgacgagttaacattagactcattttgtgaaaaagcacaaaaggcagttgatacatatgtagtcaaataattaatatattgttttacgtgttttacgggaggtaaggacaatgaaaaagaagacaaaaggattgtggattgcatggcttctggtacttccggtagtgattgtaagagcatttactacgctctatccaattatcatgacctttataaacagtacttatgatatgagtttattaaaaggcaataactttcaatttataggattagaaaattatcttagaatatttgaagatcaaaaattattatcttctatcggatttactgtgaaatttacggttgtatcaatgtttttccatctagtattaggtgtgattcttgcattaatgttaaatatgaagatcaaaggtaaaaaattcctgcgtacaatagtacttataccatgggcaatgcccatggtagtagcgggacttgctgcaagatgggcgtttaatgatcaatatggattaatcaatgatttgattagaagatttgtaccgaattttcattatgattggcttgtgcatgcaaattcagctcaaggagcagttattgcagttgatttatggaaggacttacctttctttgcaattttggtgcttgccgcattacagtttttatcagcagatatttatgaggcagcaaaaatcgatggagcaggaccggtacgagcttttttctcaattacactgccaaatataatgaagacaatactgagcctttctattttctttacaatgtggcgattgacaagttttgacttagtatatgctatgacatcaggaggcccaggggattcaacatctttgttagcatatcgaattatgcaggaggcttttactaatttgaatctcggatatgcgtctgcaatagctgtctgcctgtttattgttatgacaattttaagttttatacagcttagagcaatcaaaaagtttgattaaaatatagaagggagaggttgacaatgaaaccaaaaacaaaaaaagttttggcaccgatattcaaatggggcttgattttaatagttgcttttattattttacttccattactttggatttttacatcatctatttcacctgcttctgagctgtttagttcaccgattcactatctgccaaaacatcctacactggataattatattagaattttcacgcagatgaatttgggtgagaagattttaaatacagcaattattactgtatgttcgttaatcttatcaacagttatctgcttaatggcagcttatgcatttactcgttattcaggaaaaggacttacacttgtatatgcagcgatagtggcatctgctttaattccgggaattgtaacagcaagaccgttatatgatctgatgaaaagatttggattagttgatacatttcctggcttgatcatcatgtatacaagtgcattgattccatttactatgttgattttaggtaatttcttaagtgaaattcctatttcattagatgaagcagcagaaatagatggagcgaatatgtttcagaaactgttttatatcacgttgcctttaatgaaaccggctattgcaacaatattaatcattaattttataaattgccttaatgatttattcactccattgttttttgcacaaaaaatagaagtattaagtgttgctattacaactattccaagggagacatcatatagtatgccatgggatttgataagtacagttggatgtattatcctgctgccaatagttattttcgtacttatttttgagaagcagatcatggaaggtgttatggctggcggcgttaagcaataagtggaggtgtgaataatgtcagatattttcagattaagaaatggaagatcgagagctataaatgctgaaaatccaactggagaaaaaggaaagggtggaattgcagcaagtcatcttggcccttcaagaaaaggtagtccgtgcttgaaaaatattatgccgaatgaaacggtagtattagctgaaatggatggaccgggtattattcagcatatatggattacagttaataataaaacatcagatgcggattgttatgtactccgtgatttagtactccgcatgtactgggatgatgaggaagttccatcggttgaaagtcctttaggtgatttcttctgctgtggttttgcaagagaatgtcttgttacatctatgccaatatccgtaattccaaacagaggttttaatagctattttcaaatgccatttcgtaaaaaagcaagaattactttagaaaatcaacatgataatccaattcctgatttcttttatcaggtagactattgtttgtatgatgagttaccagaagatacagcttattttcatgcacagtggagacgtcaaagaataacagaactggcaaaggattatgttattttggataatgtgaaaggaaaaggccattatattggtacatatcttgctctgacaacacttgaaagatactggtggggagaaggcgaagttaaattttatattgacggagatgaagaatatcctacaatatgtggcacgggaacagaggactattttggcgggtcatggagttttgctcaccaggtaaacggaaagacggtagaacagacttataattctccatttttaggatatccgtattattcagcacacgatgaactggtgcataatccatatcataatgatgattgtccgccaatgagaggattttatagatggcatctgatggatccgatttgctttgaagaaaatttaaaagttactatccagcagatcggtgtatgttataaaggactatttgaaagacaggatgatgttgccagtgtagcatattggtatcagagtgaaccgcatcaggcttttaaaccgttaatgaataaaaaagagagatggccaagatagaatggtctaaatcattacaaattgagtgtaattgtaaatttaaaattttgtgaagcccatgaaataaggacttcacaaaatttttagaaaagaattagcactcaaccctttacagtgctaacaatacgtgctatattcctaatagaacacaggaaaagaaaatttgtggttcaaaggagggaaagaccatgaatatcaataaatttacacagaattcattacaggcagttcagaactgtgagaagattgctgcggataacgggaatcaggaactggcgcaggagcatttgctatatgcgctgctgacacaggatgacagtctgattttaaaattatttgagaagatgaacattcagggccagctctttattaacagtatcgagcaggcaatcggcaagagaccgaaggtacagggaggtcaggcttatgtcggtcaggacttgaataatgtgctgatctatgcagaagatgaagcaaagcagatgggagatgagtatgtctctgttgagcatctgtttcttgcaatgctgaagtacgcaagccgtgagttgaagcagattttccgtgaatatggcatcagcagagagggtttcctccatgcgctgtcaacagtaagaggaaatcagagagttacttctgacaatccggaagcaacttatgatacattgaataaatacggtcaggatcttgttgagaaagcaagagatcagaaactggatccggtcatcggacgtgatgaagagatccgtaatgtgattcgtatcctgtcccgtaagacaaagaataacccggtgctgatcggtgaacctggtgtaggtaaaactgcggttgtagaagggcttgcacagcgaatcgtcagcggagatgtaccggaaggcctgaaagataagacaatcttttcgctggatatgggagcactggtagcaggagcgaagtatcgtggtgaattcgaggaacgtctgaaagccgttctggaagaagtgaagaacagtgacggaaagatcattctttttatcgatgaacttcatacgattgtaggagcaggtaaaacagacggtgcgatggatgcaggaaatatgcttaagcctatgcttgccagaggtgaactgcattgtatcggtgcaacaacactggatgagtatcgtcagtatattgagaaggatgcagctttggagcgtcgtttccagccagttctggtagatgagccaaccgttgaggatgcaatctctatcctgagaggactgaaagagagatacgaagtcttccatggagttaagatcacagatagtgcgcttgttgcggcagttacactttcgaacagatatatttctgatcgtttcctgccggataaagcaatcgaccttgttgacgaggcgtgtgcactgatcaagacagaacttgattctatgccgacagagcttgatgagcttcgccgtcgtgtgatgcagatggaaattgaagagtctgcacttaagaaagaggaagatcgcttaagtaaagagcgtctggaacatttgcaggaagaactggcagaactgaaagcgcagtatgcaagtaagaaagtacagtgggagaatgagaagaattccgtagagcatgtgcagaagatccgcgagcagattgagcaggtgaacaaggagattcagaaagcccaaagagagtatgatttgaataaggcagcagagcttcagtatggtcgccttccacagctgcagaaacagctggaagaggaagaagcgaaggtaaaagcaaaagatctttcacttgtgcatgaatctgttacagacgatgagatcgcaaagatcgtttccagatggacaggtattccggttgcaaaactgaacgagagtgagagaaataagacacttcaccttgcagatgaattgcataagcgtgtcatcggtcaggatgaaggtgtagagcttgtaactgaagcaatcatccgttccaaagcaggtatcaaagatccgacaaaaccgatcggttccttcctgttccttggacctacaggtgtaggtaagacagaacttgcaaaggcacttgcccagagcctgtttgatgatgagaacaacatggttcgtatcgatatgagtgagtacatggagaaatattccgtgtctagactgatcggagctcctccgggatatgtcggatacgatgaaggcggacagctgacagaagcagtcagaagaaaaccatattctgttgtacttttcgatgagatcgagaaagcacatccggatgtcttcaacgtattgctgcaggtactggatgatggacgaatcacagattcccaaggacgtacagttgacttcaagaatacaatcttgatcatgacttccaacattggtgcaaactatctgctggaaggaattaaggacgatggttcgatcgatgaacagagtcaggagatggtaatgggtgatctgaaagcacatttcagaccggaattcttgaaccgtctggatgagattatcatgttcaaaccattgacaaagacaaatgtacgttccatcattgaccttctggttgctgatgtgaaccgccgtctggaagaacgtgaactgagtgttgagctgacagatgcggcgaaagactttgttgtggaaggtggatatgagccgatgtacggtgcaagaccactgaaacgttacttgcagaagaatgtagagacattagctgcaaaactgatccttgcaggagatgtgggacgtggagacacgatcttgatcgatgtgaaggatggtaaactgacagcaggtgtgaagaaataaaatatgataccagggtcaaaaggtctgaaaccaccggtgcttgcacaaaggtggtgtaatggccttgggacccgccccaatatgagcataaaagtggagcgtaagcttcacgatatgcgaatagtgggtaggattgcgagagcatgaaaggcgaagcaatccgtgtattatagggggcaaaatactttttgcccccaacatcaaaatatcagtatagtaacgatataatatgtggggctgtgaaaaatgaaaattttctggagatttttagaaaattgagtttttcacagctcttttttcgttcaccgaagtaattgatacaagagcagactctatgttaaaataagaaactgacagaatgcatatgcatacaacaagaattaatactaagaaagaactcaggcagaattccggaaaggaggttcccatggcgcgcattattttccacatcgacgttaattcagcatttttaagctggacggcggttgaacaattgaaaaatggatcaaaagtggatctgcgggagattccggcgattattggcggagatcagagctctcgtcatggaatcgttcttgcaaaatcatcacttgccaaatcctatgggattcagacgggtgaacctgtagtaaatgcatttcgaaaatgtccgaatcttgtgacagcaccgccgaatcataagatgtatcgagaaaagagccggatgctgatgggtttcctgaggacatatacaaagaagatcgagcaggtcagtgtcgatgaatgttatatggattttacagagcttgtcgggcgatatccaacaccggtggacggggcgatggagattaaggaagaggtaaagagacgttttggattcacggtgaatattggaatctccagtaataaactgttagcgaagatggcttcggattttcagaaaccggatcggatccatacgttatttccggaagaggttccgcagaaaatgtggccgcttccgatcggagaactctttatggcagggcgttcaagtgtggaagtctttaagaaacttgaaattaatacaattggagatcttgctcatgcggatgtaaatgtaattacgctgcatttaaaaagtcatggccggatgctctggaatttcgcaaatggaatcggggacgataaggtacagtatgaaccggaagaggcaaagggagtaggaaattcaacgactctgtcagaggatgcaacgacttatgaagaggcgagagatgtatttcgtgagcttgcgcagagcgtggggaacaggctgaagaaggcaggaaagaaagccgggatggtgagcatggaggttcgctattatgatttcagaaatatgtcgcatcaggtgcagcttcaaaagccaacgaatgatccggttatcttatgtgagacagcatgtaatttgttccgtgaaagctggagtggagaacctgtccgtctgctcggaatccgaacgtcaaagttagtagaagagaatgcaccggagcagctgacaatctttgatatagaacttccaaaagaaccggatgagaaacataagaaattaaatgccgcattggaacagctgaacaatcgttacggaaagggtgcggttgtgaaaggcacattttataaaccggacggaaagaagaaaaaagatggaatttagaagagatagaaagaggaacgtgcattgaaagaaaaaaattataatctggaattgattcgaatgatttcctttatatttgttattgtgattcatgtatcgaattattattgcagagcctatggcgatattacgattggggagtacagtttttcactgctattaaatctgctggcaaggataagtgtaccatgttttttcatgatcacaggagcacttctgcttggaagacaggaatcacttcataaacatgcaaaaagaatctttcgttttctaattgttctgcttgtgtggagtgtaatatatatgatctggaatgcagtttatatgaaggatccttatcaaatcaaagatttattatataagccggtagaacagcatctgtggtatctgtatgcaatgattccaatctatctggtacttccttttttccaggttatgtgtaaagggatgaaccttcggatggaacgcgcatttcttgtggtgattacggcggctgttttgttcaattatatttccacattttttgatgaaaagatgtattattccgtcccaatggtgggggacagaatctattcttattatgtatttatcggatattatatatataaatatcgtaagcatgtgatgaaggggaaaatgattccggcaggtatttttgtagtatgcatggcattaaattatgggctgacttatgcggcaaccttgcaggatggagaacattatgaacgtctgctggaatatggtaatccactgcttgcactggcagcagcgatggcatttcttatgttagtacgattgaaaaagagcgaattcaatccgtccgaacaggcaaagaagtggattgacagattttgtggatgttcctttgggatttatttgatccatatcatgtttcttgatgtttataagagaaatattaagccagagacattttcagcctggatcatgattccggtagtgagtgtgggacttgtgttattgtcatttggatgtgtctggctgattcgaaagacgaaaacaggacgaaagattatgtaggtttttttgcatatgtggtgagattatgttattctataaaggttaagacaatcgttatttgcctgaaagtcaatgatgcaatacaccagttcagaacaggagggatagatcatgaaattagataaattattagaacgcctggactacacagtagtacagggaagtgattctacggaagtaacaacactgatcaatgattcaagaaaagtggaagaaggatctgttttcgtgtgtatcagcggagcagtatctgatggacataaatatgcagcggatgttgcggcgaaaggtgcggcagctgttgttgtagagaaagatgtcgaagtgccggaaaatgtgactgtaattaaggtagaggatactcgttatgcactggctctgatgtcagcagcttactttggatatccggcagataagatgaaagtcatcggtattacaggaacaaaaggaaagacaacaacaacttacatgatcaagtctattcttgaagagacaggacacaaggttggattgatcggtacaatcgaggcaattatcggagacaagaagatcccggcatgtaatacaacaccggagtcttatacaatccataaatattttgcagagatggtagaagctggctgtgactgtgttgttatggaagtttcatcacagggactgatgcttcacagaacagcgggaattccatttgagatcggtattttcacaaatcttggaagagatcatattggtccgaatgagcataaggattttgatgattacaagagatgcaaagggcttttgttcaaacagtgtaagctcggaatcgccaatgtggatgacaagtatttcaaagatgtatttaaagggtctacatgtaaggttgagacattcggattttcaccggaggcagatcttcgcgcagagaatgcagaactggtatccagaccgggatatcttggtgttgcataccatgttgcaggcgtgatgaactttgatgtggaaatcgatgttccaggcaagttcagtgtttacaattcactgactgcaatctcagtctgccgccatttccaggtgccggttgagatgatcaaagatgcacttaagaaggcaaaggtaaaaggacgtatcgagatgatcaaggtgtctgatgattttacactgatgatcgattatgcgcacaatgcaatgagtcttgaaagtcttctgacaacattgaaggaatataacccgaaacgtcttgtatgtctgttcggatgcggcggaaaccgttcgaaagacagaagattcgagatgggtgaggtatctggaagactggcagacctgacaatcattacatcagataatccgagatttgaagaaccacaggatattattaacgatatcaaaaccggaatcgcaaagacagatggaaaatatgtggaaatctgtgatcgtaaagaggcaatcaaatatgcaatcgaacacggcgaaccgggtgatgttattgtgctggcaggaaaaggacatgaggactatcaggagatctgcggcgtgaagcatccgatggatgagcgcgtgctgatcaaagaagttttggaagaattaaaagagaaataagattgtgtttgcagatgttattgtagatatacaacatgaaaaactggataagatctttcagtaccgaataccggaacgactgaaagacgagctgtatccggggctggaagtaattatcccttttggaaaaggaaaccgacagatcaaaggttatgtgacttcattatcagagacttgcaattatgatctgtcaaaggtgaaggagattacagacatttccagaaacagtgtggcaatcgaagcgagactgatcgcgctggcggcatggatgaaagagcagtatggcggaacgatgatccaggcgcttaagacagtgctgccaatcaagcagaaggagaatgcgaaggtaaagaaacatctccgtttgctgcttactgaggaagagagtcgggagaagctggctttttatcagaaaaagaatcagaaagcaagagcgagacttctggaagctttgatggaagtaccggttcaggattatgagctggtgacgaaaaaattaaatgtgacgttgcctgtgatccgggcattggaagagcagggcgtgctgaagatagagtcagagcaagtataccgtaatccggtgaaacaggcaaagaaatcacagcaggaaatcatctatacagaagaacagcagcatgtgatccagggattccggcaagactatctgtgtggaacaaggagaacttatctgcttcacggagtgaccggaagtgggaagacagaagtctatatggagatgattcgcactgtggtcgggcagggaaggcaggcaatcgttctgattccggagatcgcactgacctatcagacagtgatgcggttttaccgctgtttcggcgacagagtttctatcatgaactcaagactgtctgccggagaacgttacgatcagatgatgcgtgcaaagaggggcgaggtcgatgtgatgatcggaccacgttctgcactttttactccatttccggatttggggctgatcgttatagatgaagaacatgaaccaacctacaagagtgagcaggtgccacgctatcatgcaagagaagtggcagtccacagggcagaagtagaagatgccagtgtagtgcttggaagcgcaactccgtccatggaggccatgtacagggcaagacttggtgaatatcagctttacgagatgaagaaccgttcccatatgcagcagatggcaactgtgtatacagtagacatgcgtgaagaactgaagaatggaaaccgatccatcttgagtgagaagttgcaggaactgatcgaagacagactgaatgcgaaagagcagatcatgctgtttttgaatcgcaggggatattctggttttgtttcctgcagagaatgtggccatgtagtgaaatgcccgcactgtaatgtatccttgtcggtacacaaaggtggaaaaatggtctgccattactgtggatatgagcagccgaaggtgacgaagtgtccggaatgtggatccaggtatatcggagaattccgcgcaggaactcaacagatcgaggatatggtgaaggcaagattcccacaggcaagagtactacgcatggacatggatacaacgaagaaaaaggattcccatgaacagattttatctgcatttgcgaatgaagaggcagatattcttgtgggaacacagatgattgtaaaagggcatgattttccaaaggtcacgttagtcggtgcattggcagcggatatgtcactttatacagatgattatcgttccggtgagcgaacattccagcttttgacacaggcagcaggccgtgccggaagaggtgacagaccgggtgaggttgtgatccagacttacgatccggagcattatgcaatcgaggcttcagcagcgcaggattatgaagccttctatgagaaagaaattcgctaccgcagtctgatgggatatccaccggtggagaacctgatggcagtacttgcggcatgtgaagatgaggcgcttttggagaaagcgtgcaagtatctgaaggaatacattttgcggatcaaagggcaggcacagctcaatgtgatcggcccggcaagtccgggagtggataagatcaaagatatttaccggagagtggtttacgtaaaagctccggaataccgaaccttagttgtattaaaagacaggatggaacaatatatagaaattaactcagggtttcagaaaatgagaatccaattcgattttaacccaatgaatttatagaaaagagaggaaagaataatggcaatcagagaagtaagagagatgggcgatgacgttcttgaaaaacagtgtaaaccagtgacgaagatgacacttcgtacaaagattttaattgaagacatgcttgatacgatgtatgagaagatgggtgtgggtcttgccgcaccgcaggttggtattctcaaacagattgtagtgattgatgtcggagagggtccgatcgttttgatcaatcctgagatcattgagacatccggtgagcagacaggcgaagaaggttgcttaagtgtgccgggaaaatggggaatcgtgactcgtccgaatcacgtaaaggtacgtgcactggatgaaaatatggaggaattcgagatagaaggagaagaacttcttgcaagagcattctgtcatgagatcgatcatctgggaggacacctctatgtagagaaagtagaaggagaactgcatgattcaccggcctacaacgaggaagatatggaatacgaagtggaggaataattgatgagaataattttcatgggaacaccggatttctctgtgggaacactggaggcactggtggaagcaggacatgaggtatgtctcgtagtgagccagccagataaaccaaagggacgcggtaaagagatgcagccaactccggtgaaagaagctgcgatgaaacatggaattccggtttatcagcctaagaaaatccgtgatccggaatgtgcagaggaactgagaaaatataatgcagatgtgatggttgtcattgcatttggtcagatcattccgaaagaaatcctggagatgacaccatatggatgcattaatgtacatgcttcacttcttccaaaataccgtggagcagcgccgatccagtggtctatcatcaatggcgaggaagtaacaggtgttacaacaatgcagatgaacgaaggactggatacaggagacatgatccagaaagtcgaagtgccgatcacagaagaggagacaggagaaagccttcatgataagcttgctgaagcgggagcgaaactttgtgtagaaactctgaaagccattgaagatcatacagcaacttttgagaagcagggtgagagcccaacagaatatgctagaatgctcgataaaaagcttggaaatattgactggaatacatccgcagtacagatcgaacgtctggtgcgtggcctgaattcctggccaagtgcttatacacattggggcaaaaaggtagtgaagatctggagagcaaaagctgaggctgacggaacagcaaaagcagagcctggaacagttttgagcgtagagaaagattcctttactgttcaaacagggaatggagtcttacgagttctagaacttcagataccggggaaaaagagaatggatacaggagctttcttaaggggatacacaattgaaagcggagttaaatttacacaggaataagagtactcttggagggggactacagataacaggaggtaattaaagtatgtattatggattttattatgactggacttatatactggtactgatcggtgtggttctcagcctgctcgcatcatcccaggtgaaaggaacatttgcaaaatattcgaagatccgcagttattcggggatgacaggacgagaagcggcagaacagattctcaggagaaatggaatctatgatgtgcaggtgactcatatagcgggaaatctgaccgatcattatgatccgagaaacaagacactggcgctttctgatccggtttataattcaacttctgtagcagcaatcggagttgcggcacatgagtgtggccatgcagtacagcattttgaagggtatgcacctttatcaatccgtggggcacttgttccggtcgtaaatttcggctccatgatttcctggccgttgatcattatcggcctgtttatgaatggccagatgtccagcttccttattgatatcggaattctgctctttatggtagctgtggcatttcatcttataacacttccggtggaaatcaatgcttccagaagagcggtgaaggtacttggaaattcaggaatgctccgtgaagacgaagttggtggagtgaagaaggtacttcgggcagcagcaatgacatatgtggcaagtacggccgcaatgattttacagcttttacgtttgttgatcctgacaaatggacgaagaaggaatgactgataaaaagaaaaaatgctgtaactgttcagagccaacctccaaaatgcggagaataggagattatttatgggaaagcagatcaatgaacgagagatcgttctagagattttgatggaaataacagagaatggagcatatagtcataagattcttggagatgttctgtcaaaatatcaatatcttgagaaacgtgagcgtgcatttatcaccagagttgtggaaggtactctggaacatatgatagaaattgattatatcttgaatcagatttctaagacaaaggttaagaagatgaaaccggtcatccgtaatattcttcgcagtagtgtctatcagctgaaatatatggatagcgtaccggatcatgcggtgtgcagtgaggcagtaaagcttgcggttcgaaaaggattttcaggtctgcggggatatgtgaatggagttctgagaaatgttgtccgcaagatggacgagatcgagtatccaaaagaagatgtacagagattgtctgtgaaatattctgttccggaatggattctttctttatggaagaaagaatatggggaagagatcacagagaagatggcagcagattttcagaaagagaagccaattacgatccgctgttgtatgaaccgggttacaccggaagtattgaaagaaaaattggaagcagagggagcgaaggtagaagcacatccgtatcttccttatgcgttttatctttcagattatgattatctggaaggcctggaaagttttcaggaaggactctttgcagtgcaggatatcagttctatgtttgtcggagaactggcagctccaaaagtcggcgatcaagtaattgatgtctgtgcggcaccgggaggaaaatcacttcatgtggcagagaaacttcagctggcagatgaagcggcagcgagagagaacggaacagaagaaaaggtaggacgggttgaagcaagagatctgactgaatataagacagatttgatctggcagaatatcgaccgttctggacttggaaatatttgtgcagtatgtaaggatgcgtcagtgtttgataaatatgacgaggaagcagcagatcttgtgatcgcagatcttccgtgttccgggctgggagtgcttggcaaaaagccggatctgaaatatcgtgtacaaccggaagatcttgaagaacttgcagatctacagagaaagatcctgacttgtgcacaggcaattgttaaggaaggcggaacattgctgtacagcacatgtaccgtgaatccgggagagaacatagagaatgtgcactggtttttaaaagaatatccacaatttgagctggatgatattacagaaaatatttgcaaagagttaaaaagtgatgtgatcgagaagggatgtatccaattcttcccgggagttcacgattgtgacggattctttattgcaagatttaagaaaaaagcatgattttcaggaaatgtgaaaaaatagaaaaagcagataaacaatgtgaataactcacagaaaaaacgaaatacaggaggaaaactttaagatgaagaaggatatccgtgcttatggatatgaagaattacagaaagagatggcaacgatcggagaaaaagcatttcgtgcaaaacagatttatgaatggctgcatgtgaagctggtagatcattttgatgagatgacgaatctttcaaaggttttgagggaaaaactggaagagaattatgagattctcccggttgttatgctggagagacagatttcccagattgacggtacgaacaagttcttgttccgtctttatgatggaaatgtagtcgaaagtgttcttatgaaatataagcatggaaattctgtctgtatttcctctcaggtcggttgcaggatgggatgtgcattctgtgcatcaacgatcggaggtctggtgagaaatctttctccgtctgagatgcttggacagatttatcagattcagaagataagtggtgagagggtttcaaatgtagtgatcatgggaaccggtgaaccgatggataattacgataatttcctgaagtttattcatttacttacagatgagaatggattgaacatcagtcagagaaatgtcaccgtatcaacctgcggaatagttccaaagatgaaagaactggcgaaagagcatttacagatcacacttgcactttcacttcacggttccaatcaggaaaagcgaagaaaattgatgccggttgcaaataaatatgatatcacagaagtactcgcggcctgtgacgaatatttcaaagaaaccggccggagagtgagttttgagtacagccttgtgcatggtgtgaatgatacggatgaggatgcacaggaactgattcatttattaaagcacaagaactgtcatatcaatctgataccggtcaatccggtaaaagagcgtgattttgttcgtccaagccggaaaagtgctttgaatttcaaaaataaacttgaaaaaagcggaataaatgttactataagaagggaaatgggctctgatattgacggagcctgcggtcagctcaggcgccgctacgtagaaactgaaggagaatagaaggtatgaagacattttcaattacagatgttggaatggtgcgacaggtaaatcaggactacgtctttacgacgggaaaaccactgggtattctccagaacctgttcgtggtagcggatggtatgggtggccatcaggcaggagattatgcttccaagtgtactgtggaagtgatgatcaaagagattgcgaagagcgagggcgaggatattgaacgtgttcttgtaaaagcaatcaaggctgccaatcgtgagattatcaaagaagcatccggtgacgaacatctgaaggggatgggaacaacggttgttgccgctactgtgaaagaacagatgctgtattttgccaatgtgggagacagccgtctgtatctgatcaatcaggggatccaacagctaagtaaggaccattctcttgtagaagagatggtacgtcttggtggaattaagccggaagaagcgaagcatcatccggataagaatattatcacaagagcgatcggggcaaaagctgatgtggatgtggacttttatgaacaccgtctgaaacggggagacatcattctgatgtgtacagacggattaagtaatatggtggaagatgaagaacttttccatattgtgcagggaagccgggatatcgtcgaggcaggtgagatgctggtggaagcagcaaaagagaatggaggaacagataacatcggagtggtattgtttgagccatttgcagatgaggtgagtgtatgattaaagaaggagtatttttagggaaacgatacgagatacttggccgtatcggttctggcggaatggcagatgtctataaaggcaaggatcataagctgaatcgttttgttgcgatcaaggtgctgaagagcacgtatcgttcggatgagacgtttattaagaagtttttaagcgaagctcaggcagcagcaggattgatgcatccaaacgtagttaatgtctatgatgtagggcaggatcgcggtctttattatatggtcatggagcttgtagaaggaattacgctgaaggattacattgagaagaaaggaaagctttcagcaaaagagacaatcagtatttccatccagatggtgacaggtattcaggcagcgcataactgccatatcattcaccgggatattaagccgcagaatatcattatttccaaagatggaaaggttaaggttactgatttcggaatcgcgcgggctacgacatcaacggcaacacaggcagtaacaacgacagtgatgggatctgtacattacacatctccggaacaggccagaggcggtattgtagatgagaagagtgatatctattcagcaggtatcacgatgtatgagatgatcaccgggcatgttccgtttgacggagattcgacagtgacggttgctttgaaacatttgaatgaagtgatcaagtctccagcagaagaagttccggatattccgtacagcctggagtgcattattatgaaatgtacgcagaaactgccgaataagcgttatatgagctgcgaggagctgcttcaggatctgaagcattcactggtagatccggaaggggattttgttgttcttgatggtgtgacaaaacgtatgccggcaacatcccaggatacaggtcggactacggttgttatgtcaccggatgaactgaatcgtatgaagaatcgtcagaattataatgatgattatgacgatgattatgatgatgattatgaggacgactacgatgaccgccgtagaagccgttatgatgatgacaatgactacgacgaccgctgcagaagccgttatgatgatgacgatgactacgatgatcgccgcagaagccgctatgatgatgacgatgactacgacgaccgtcgcaaagaccgttatgatgaccggaatcgccgtaagaagaatgaagtaaataaagacacgaagaagatcatgaagattcttatggttgttgccggtgttgtgatcgcacttttgatcatgttccttgtaggaaatgcagtgggcgtatttaaaggtggaaaaggaacgactacacagcaaacagattcagagatggtaaaagtaccggatgtgacaggcaagacatatgaggaagcacagaaagaactgaacaaatatgatctcggaatccataagtcaactgcgccttccgatactgttgcaaaaggaaagattatcagccaggatcctgctgatggaaagaaagtaaagaagcatacaacagtcaatgttgtgatcagcagtggtgaagaagctaagatgacaacgattccaagtgttgttggtttggcagaagctgatgcagaaaaagcacttcaggcgaagaaccttgttgtgaagaaaggtgatcctgtttacagtgatgatgtggagcagggagaagttgtttctgttagtccaagtgaaggtgcagaagtaaaagaaggaacaacggttactcttgtaataagcaagggaaatcagccgacaaaagttcctaaacttaccggaaagtcccagtcggatgctgaagcagccctttcacaggcaggtttgtccggaaatgcaactgaagattacagtgatactgtagaaaaaggattggttatttcacaggatacagatgccggaaaagaagtatctaaaggtacaacaattggatatgtggtgagcaaaggaccaaagctgacggtggttccagtgccaagtataatttcttttgataagaatacagcagagaaaaagctgaaagaagcaggattaacaccagagtatattggtgatgactatagtgataattatccgaaaggtcaggtattttatcagtctgtcagcggtggtactcaagtggaaaaaggaacaacagttcagtatatggtcagcaaaggacagcagcctacagatccgggacagggatctggaactggttctgaaacagaagattctggaaatcaatgataacagagagcaagtatatgcagggaaagataataaaaggaattgccggattctactacgtgaatgtagtagaatccggaatttttgaatgtaaagcaaaaggtgcctttcgaaaagacggaatcaagccgttggtcggtgatgatgctgtgatcgaggtgcttgatgaaaaagaaatgacaggaaatatcacagagatcctgccgcgtaagaatgagttgattcgtccggcagtagccaatattgatcaggcactggttgtgtttgcagtgacaaaaccgaaaccgcattacaatctgttagatcgttttcttgtcatgatggaacgaaaagagatacctgtcgtattatgttttaataagacagatattgcaagccatcctgaaattgcagaattgaaagaagtttataccggatgcggatatccggtgatctttacaagtgcaaaggaagaagaaaatatcagtgagttaaaatcacttttaaaaggaaagacaacttcaattgcaggtccttccggtgtcggaaagtcttctctgatcaatcttcttcagagtgaagtgaagatggagacaggaagtatcagtaagaagattgaccgagggaaacatacaacaagacattccgaactgatcgtgatcggagaagagtcttatattatggatactccgggattcagttctctttacgtcaatgatttcgaaaaagaagatttaaaatattattttccggaatttacaccgtttgaaggacagtgcaagttcaatggctgtgaccatattcatgaacccggatgcgctgtgaaagaagcagtagaagaagggaagatccataagatcagatatgaagattatacggagatgtaccgtgaactaaaggaaagaaagaggtattaagtttatgaaaaatattttggcaccatctattctctcagcagatttcaagattttaggagagcagttgaaattaacagaagaagcaggcgcagagtatattcattttgatgtgatggacggaatgttcgttccaagcatttcctttggaatgcctgttctcgcatcaatcaagggagcaacaacacaaacactggatgttcatcttatggtgacagaaccgatccgttatgtggaagaattcgtgaaagcaggagcagatatcgttacagttcattatgaagcatgtgaagatctgcaggcaacaattgataaaatccatgcagcaggagcgaaagtgggaatttctattaaaccgaagacaccggttgatgtactgcttccatatctggatcaggcagagatgtttctgatcatgtctgtagaaccgggattcggcggacaggcatttattccggaatcactggagcgtatcagtgaattgagaaaccttctgaatgaaaaaggacttacaactgatattgaagtagatggtggaatctatcataaaaacgtggcagaagtacttgcagccggagcgaatgtaatggtctcaggttcaggagtttttaaaggcgacatcaaagataatacagcaaagtttatggagattttaaacggcaatgtgtaagagaacagttattgtgagcgggggaatgctggaagaagattttatccttccaattcttgaggcagaagagacagaatttattatcggagtagataaaggactcgcatttctttatgaacataagatcaagccggattacattgtgggagattttgacagtgtaccggaagaagtgatcgattattatagaaaagaagcaagtgtaccgatccgggagttcaatccggtaaaggatgcgtctgatacggagattgcacttcgtatgtgtcttggactcagaagaaaagaaatctggattcttggaggaacaggaaatcgtttggatcatttctgggccaatgtccagtgcctgaatattgcacttgaagcaggatctcaagcgatgatcttagacagtcataatagaattcgtctgcttgatcatggaatcgcaattcgcagagaagaagctttcggaaagtatttttcagtatttccgatgcaatttccggttgaggatttctgtatcagcggtgcaaaatatccattgcagaatcatttgctctcatcaggagacagcttgtgtgtgagtaatgagttcgcggaaggtgaagatgaagtgaagatctcttttgtgtttggaaaagttgttttgatggaaacgagagattgaaataagggatttataggagcattcatgtaagtttttgaagaattgcccactttgtggctcactaatcttggatgtttttatcgaagctttaatgcagtaacaacgcaacaattacataaaaagagttgctatttttatgaatttgtcatatactattcttagatagagagcctatcttcgggagagttcctgccatataagtggaagattttaaactcgggagagctcctgccatataagtggagaattttaaactcaaagggagcgttagctcccttgttttcgtataaggagaaataaataaaaggagatacggatggaagaattcaaattatatagtgtttcggatgattatgtggaatggttgcgtaaggattttccaaacgtatattctaacaaaattaattctagaacacatactaggaaatatttgggtgtagttttgcagattggacaatatctttattatgttccgatgtcatcgcccaaagattcggattatcagattgcaggagcaaataaggtcattaagaaaagcattgtgccaattatacgaattgtagtaaaaaataaagatggtgaaaaagaattaaagggcacactcagaattagccatatgattccggtacctacatcagaacttgaattatatgatttggaaaatgaatcagatagtacgtataaggatctcgttcacaatgaaatgatttttatacgtaaacaacgtgagaaaattatttcaaatgccaaagtgatgtacaatcaaaaagtatcaaatgatacaacggctgggtatgtgaaatcagcactagattttcaagcactagaggtgctatgtgataagtatgaaacaatagattcaagcctgtacccagtagtataaaatagtagatgaaaatttagtagaaaacatattgattttgtgaatgaaattggggaatatatgcacataaaataaaaactttcgaggtttttatcggaaatggtgcttgcaccaagtctgggtttgaaaaagtccgttacaatatacagaggtgttatatatattgtaatggactttttgtattacattctagaaaaatcaggaggtgtgtatggtaataggaattatagaagatgataaattgttaagaaaagcattagatagatctttgaaaaatcaaggttatacaacgattcttgccgcttcaagaaaagaggcaattaaaaatatagatagttctgtagatttgttgatcgtagatattggattgccggatggggatggaataaatctatatcaagagcttcaaaaaaatggaaaaattccagctatttttttaacagcaaaagatgatgaaaaagatatgttaaaagcgtttgatacaggagcagatgattatgtggtcaaaccattttcaataaaggtattgctaaaacgtatagaagttgttttaaagagaaagtcaaatgaaaatacttttatatgcggacaagtcattttgtattctgatagaaaacaggttttcgtcggagagacggaaatatttttgacagtcaaagagtatcagcttttagaatatcttattatgaatcagaatcaggttcttacaaaagagatgataatggaaaatatatggggaatcgatagtgaattcattgattctaacacaattagcgttatgatcagcagactgaaaaagaaattgaatgattcatcgaatgttatcagtaatgtatttggaatgggatatagaatgggagattagcatggttgtagcaatttctacagtacttttaataggtttcatactcggaggaagtactgtatatttagtggaaaatcatttaagagcgaaggaaatgaataaaatatataaattgacggaatccttaataaacggcaatgaattagatggttcagatatcgggaaggaaacgctttattccaaaactagcaatcagctaatccgtttacaggaaatgttagagggaagaagaaaagaggccgaaaaaagtcgatatgagatacagaaattgatttctgagattgcgcatcaactacggacaccgctgtcaaatataaaaaattatacagaattgctgcaagaatcattgaatgaaacgcaagaagtattgaatgcagaatacatgaaagacttgcgaataagtgaagaacaattatgctttttggtggagagctttataaaaactgcccgattagagcaaggaatcatacaagttcacatgcaaaaagaaaatcttgtcgaaacgattctaaatgcgttggggcaaatacagaaaaaggcagaagagaaagaaatcttttttcaagtagaattgccagagaaaatcatttgcgaacatgataaaaactggatgtgtgaggcgttttataatgtgtttgataatgcagtcaaatatagtaaaaacaacagcacgatcaatatcacaatgaaacagacagaaatgttttataaaattcaagtaagagattatggaatcgggataagagatggagaagaaaataaaatttttcaaagattttatcgtggtgagcaggcaagagggcaggaaggatgcggaattggtttatatctttccagagagattgttctattacaaaaagggatgatgaaagcaaaacaaatgaagccagggctgcttatagaggtaaatcttccggtagagacagttcatatgcagcttgtaagaagtttgtaagaggtaccatgtataatagattatggctgagttaaaggtagcatttacgaaaggagtttacagaaaagatggatataatcaaagccatgaatctaaaaaaatattatacatccgatacatatgaagtgcgtgctttagatggtgtgtcgttgactgtggaagatggtgaatttatagcagttgtcggtacgtcaggatgcggaaagacaacacttatgaacatcttaggaggtcttgatactccggattttggaggtgtctggatcagaaatacaagtttaaaagatcttaacaaggaagaaagaacgatattcagaagaagaaatatcggatttgtatttcagcaatataatttgataccttctcttagtatacgtgaaaatattgtcctcccaatgagactggatggcaaggaaatcgatgtagattttttcaatgagattatagaaatactaggactaaaagataaattagaacgtcttccatcaacgctgtccggcgggcagcaacagcgagtttctatagcacgggcattattaacgaaaccggctattgtcctggcggatgaaccgaccggaaatctggattctgttacaagtatggaagtcgtaggattactaaaatcctgtgccgtcagatttcatcagacgatattgatcgtgacgcatcaagaggaagtagcgcagatggcagacagagtaatacgtatgtccgatgggaaaatctatacaagagattgtaacgattgttaggaggtatcactatgtttcataagaacattccaaataacaatgaagatataatccgattcctggctaaaaattttgcgggcacaaaaaaggtgagaaatacgattttattttgctcagtagtaatcggtattgttgctataaccatggtcttcggaatctcctgtggaaaaatacaagcagaagaaataagattaacccgagaaaatggaactgcttcttcgggcagaatagaagatggaacagaagaacaatatgcaaaattaaaacaactggattatataaaacgggttggaaaaagtatttttgtaggtgaagctacagacatttcagatgataatgcaaaaacgatatgtgatgtagtatgggctgactcagaaagctggaacaattttttgaagcctgcatataccaatataattggaagctacccacagaaaaaggatgaaattctattgtctaagcgggcattgaaaaaacttggtatttctgaaccggaacagggaatggaaataaacttagatgtatacaaaggtctgttcgaacattcgaaagaaaaattcaaactatgtggatggtatacggactctggaaataaattagcaatcggatatatttcacatgacaaaattaatgagttaaacctggaaaagggtccctatactttacttttcagtcagagcaatcatttaagcagaagcaaaacagaagaaaaattatatcaggcattgccgatgaagagtgcagatcagaagatatacgtttctgatacagcacaatatactgccgtttctaaattcgcaggtggatatgagatggtgatattaggaacgctaggtattttgtgtggaatatatttccttgtgcgtaatgttctttggatatccatgagtgaagatattcaaaatctcggattactccacacgattggagccacagaaagacagatcacaaaaatataccggaaacaaatgcggttactcatgttaaaaggttctgtcttagggagtttgatttctgtattgattttggtcttattgataccggaaatattagggtttcatttttatcaggaaatgggaggaaatatgatactttcctttttcagaccatggattctttttctttctgttgtatttgtaaatggaattttgtggatggcatcagaaggcgttattagaaaaatcacgaagctgtcttgtgtcgagagtgccacttatgatggaaatatgggtgacaaaaaaataaaacatcctggaaaactggtgttgaaacgctctgagacaggagaaatgttttatattgcatggggaaatataacacgtcataaagcacgatttatcattacaagtatttccatctttttaggagtcctgtcttttattctaatgaatgtacttacaaatggatgcgattataagcatcttcttgagaaacgccctgattttttgttggcaggagagtttagcgaattcgggaaaagccagggatgtggggaagaatataaaaccagagaaatcgatgttgatcctttgttaacacagggagacggtgtggaactgttgtatgacaatgattatgatgaattttcaccaatctctcaagagttagaggaaaaactacacgagatagatggcattgattgggagaactccaatctgatcgaaggagcctatgtaactacggttatatctaagaagggaattcgtccttatgacgaggggctttcgaatcttacagatggcaatatggtggaaggatttagctgggatactgtacaagttatagatgaaaatcaaatcttgtcacttaagaaatacgtgcaggataatcaattgaatattgacgtaaaatctttggaagaaggaaatggcgtattaattatacatgatcatatgctgactccggaacagcaaaaacttgcagatgaagcaattggagaaccggtatattttaaaacgctgctttcaaaagaagatgcaattcgtagaaaagaacaaaataattctgatagtaaagagaaacaacaggaagacgatttcctacaaaaggaatccgcaacatttactctatgcggttatttagaccagcaaagcgataatttcccggaaatacatcaatcctggcatggagaaggcagtttatattattttatcagtgagaaaggttttcaaaagataccgactgagaaaaagatattaacaatggaattaactgctgatccggaaaaagaaccttatgtgaaaacacagatcaatgagctgatatccgaggaaaataagaaacgatccgaaatgacagaagtatcaatggatgagggacccggcgaagcaggagtttttgttatctgtaaatcagatctgatgcagcaaaaagaaacatatatgagaggaaatcgaattctcttaggtgctgtaagtatcatattattcattgcgggattgactaattattgtaatgttgtatttaccgggatgtacactcggagaaaagaatttgatattatgaaaagcattgggatgaccgataagcaaatgaaattaatgctttttggagaaggcagtttttattttatgtgtgtgatgggattgttgtttactgtaggaatggtcactttggttggagtaaagatttatatggaaaataaattgtcatattttacatttcattggccgatccttagtactgtaggtgtaatgttttctttagtgcttattaatgttgtggttacacatttcatatgtaagaagacctgaaagggaaaagcctaagtgggaagataccatcacaaaccgaatgatgcactgggcatatacaccggaatagaaagaagcagtaggatatcgcataggcacagtggatatgatatactgtgtctatgcgatataaaagaaaagtacaaatgtgaatttatggagagattatgatgaaaaaatcattatcctattctgcaataacgcttgcagtaactcttgttattggtcagatattacttattttgttttctgaaggaaattcaattggttcctctgtcttgtttattttaatgaacttaacgccaatgtttgttgcgattgcttttgcaaaatcagatgggcagaaagcggtgctcaaagatatgtttttgcagagagagtccatctactcatatatcttggcaattggtagtgtatgcgtatattatggtgtttcatttataatgggaaatatatcgttgacgggcggaacaattatttcagtattggtatatatgccatggacaatcctgcaaggtggattagaagaatgtggttggagatggtatttgcaaccaaagtttaatataaagtcatatgtattaaaaatgttcttaatatcaatcgtgtggtttttatggcacattccaatttatagattaccttggattacagctggatctagtaattatctaatattctatctaatgatattaggaaatacatttatgtttggaacaataaaagaatattccaaaggtgtgttaccctgcgtaatcgcacatattttaatagattcgctagctgcagcgatgcttgtaggaagcaatattgttaaaattggaatattggtagcgtttgaaatagcgatatctatttttatagttaaagcaaaaataataacaagaatcattactattttattgacagaactattaaaatgatatataatccttattaagaacaaatcctaataaggagattggatgacaaatagaagaaatactattcagaaagatctcgtacgaaatgccgtatataagatgaaaaggcatgttacagcaactgaagtgtatgaatttataaaagaagcatatcctacaatcggaaaaggaggcagttggacaaacggaggatggtcagacgatatggcgttgcagaatctgtggatatgaatatgtaggcgaagaattaccggatgattttatatgtcctttgtgtaagcacccggcatcagattttaaaaaagtagtgaagaaaacggaggtaaaagaaatgacagcgaacaaatacgcaggaacacagacagaaaaaaatttacaggaagcatttgcaggggagtctcaggcaagaaataagtatacctattttgcttctgtagcagaaaaggaaggctatgaacagatgtcagcattgtttttaaagaccgcagataatgaaaaagaacatgcaaagatgtggttcaaggaattagcaggaattggagatacaaaagaaaatttagtagcagctgcagaaggtgagaattatgagtggacagatatgtatgaaggctttgctaaaacagctgaggaagaaggttttcatgaacttgcagcaaaattcagagctgtaggagagattgagaagcatcacgaggagagatatcgtgcacttcttaaaaatattgaaactgcacaggtatttgaaaagagcgaggttaaggtatgggaatgccgtaactgtggacatattgtggtaggaacaaaagcacctgaggtatgcccggtatgtaatcatccgcagagctattttgaagtgcatgcagagaattattaagaaatcagctgaacttgttgaaaaatttatgaaacatcattgacagaacatataaagaaatgcatagataatggtgttgtacagcaattatatttgcgttacaattaaagagattggaggtgaaatcgtgaaaactcataaatattgggcagtaggtgcattagcatgtatggttgctacattttataccggcttcagaggaaagatgaaggaacataagatttttgcgattggagcaatgggatgtatgttattttctgtactctctgggtataagatgatttcgggcaaaggtgcagttaagaaaagtgaagaagtagaaaagaattagaatatttatgcaatttggtaacttatatgaggtggattgtaaggtggttttatgacagtaattacatttgatgataatttaataacaggcaataagacaatagacgagcagcataaggaactgattgatcgtattcagcagtttgtgagtgcatgtgaatcagaagatgcaagagtaaaggcaattaaaatgcttgattatcttgatgaatatacggaatttcatttcaaagaagaagaaaaactgcagaaagatgtaggttacccaggcttggaggaacatataaagaagcatgaggagttcaggcatactgttaaggtactctatgactatctggatgaaaatgagggaccagatgaaaagtttatggaacaggtaaaaatcaatgttattgactggctgtttggtcatatcaagacatttgacagatctgtagccgaatatataaatatatatgataatcctgacagattatagaactgtttgttatgcaattatattttaataatgtatgccccagtcagacaaaatactttctgcaaagcagcagatatacttgcagataagtgtggatgtgatgtaattgcacgatttgagattgatggagatgctgtagaagttgacaatttaataaagttacaaaaaaggtattcagatgagtgttacgtatctgaatatctttttttataattgtgcacataattaaatatatgcttgacagaataaaaggaatgatataaaatcttaattaagaataaatcctattaaggaggctgaaaaaaattagaaatacaattcaaagagatatggtacttgatgcagtaaatgaaatgcacagtcatgtaacagcagaccagatatatacatttataaaagaaaaatatccatctatcggaagagggactgtatatagaaatcttggcattcttgtagaagaaggcaaggttagaaaagtggaagttccagatggttcagaccgctttgactttacactcgaaaatcactaccatgtggaatgcgtaaagtgtggagagatatttgacgttgatatggatgttatatcagagatggagaagagaataaaagacacacatggaatgaagtatataagccatgacattttttttaagggcatctgccaggaatgtcagaagaaagaaatgaaagatgcatagattggagaataaaaatgttagaagtaggaacaaaagcaccggattttgaattaccggatcagaatggagaattacataaattaagcgaatatcttggaaagaaagtaatcctatatttttatccaagggataatacacctggatgtacaaagcaggcttgtggattttcagatagatacccacagtttgttgagaaaggtgcggttgtacttggtgtaagcaaggattcagttgcatcacataagaaatttgaggaaaaacatggactggtatttacgcttttatcagatacagagcgcaaggttattgaatcatatgatgtatggaaggaaaagaaaaactacggaaaagtatccatgggtgtggtcagaacaacataccttattgatgaacatgggataatagtaaaagctaatgataaagtaaaagcagctgatgatcctgaaaaaatgctgcaggaactaagctgatgaagattatattatcacccgctaaaaaaatgaaaacagacactgatagcataggtatattatcatgtccggtattcatggaaaaaacagaagagatacttagctggctgaaaggaagaaccgaagaagaacttcaaaaaatgtggaagtgcaatgacaatattgcggcacagaacatagagagaattaattctatgaatctgtataaacaacttacacctgctgttttagcttacgagggcattgcctatcagtatatggctcctgtagtttttgaaaatgctcattttgattatgtgcaggaacatttgagaataatgtcagcgttttatggggtattaaaaccgatggatggtattacaccatatcgactcgaaatgcaggcaaaggcttcaatagggcattataaaaatttgtatgagttctggggtgagatgctttacagggaagtaatggatgacagcggaattatcattaatctggcttcaaaggaatactctaaatgtattgaaaaatatctgactccagcagacagatatattactattactttttgcgaaaagtctggtgataagcttatcacaaaaggcacatatgctaagatggctcgtggtgaaatggtaagatatatggcagagaatcatatagaaaaaccagatgatatcagaagttttaacagacttggttatgtattcagaggcgaaatttcgtcaggtaatgaatacatatttgaaagaattgtagaataacaaaaggaagggatgattgcatgaataagaaaaaatcaaattcaaaaaaggcagttatgataggctgcggattcgtaggctcagcatctgtatttgcgcttatgcagagtggattattcactgaaattgccttgatagatgcggataagaataaggcagagggagaggctatggatatcagtcatggaataccctttgccagccctatgaaaatatatgctggtgattatgatgatgtggcagatgctgcgattgtaattatatcagcaggtgcagggcaaaagccaggagaaacaagacttgatctggtaaataagaatgtggcaatatttaagtccattattccggaaattgccaaaagagattttggaggaatccttctggttgtagcaaatcctgtggatattctgacacaggttgcaatcaaactgtcaggacttccggaggagagagttatcggctcaggaacagttcttgacagtgcaagacttagaagcaagcttggacagcatttatcagtggatagccgaagcgtgcatgcatttatagtaggagagcatggagacagtgaagttgtggcatggtcatctgccaatgtatccggtgttccgcttagtgacatgtgtgagatgagaggacattataaccataaggaaaatacgaaggaaatcgcagatgctgtcaaaaacagtgcctatgagattattaataagaagcatgcgacatattatggaattgcaatgtcagtaaaacgtatctgtgaagtaattatgcgtgacgaaaaatcaatacttcctgtatcgcacatgatacatggagtatatgagattgatgatgttgtattaagtatgcctgtcattgttggtgcagacggaattgaatctgatataccgattaatcttagtggagaagaagcattgaagctaaaagaatcagcagacgcattaaagaatataattgacacattagagctgtaaatagaaagggtatagttatttaattcccattttcaccttggggaaatattacgaggaagatgggagaattgtgcttcctttagcagttcaagttcatcatgcggtatgtgatggatttcatatctgccggtttgtcaatgaactgcaagaattacgcaattcgtgttaaattttcaaggtacaaataaaatcatatattaattaacgtgtcttttgccccctaatcaggatagataaaaaatttcatcaagagcctgtatttatgaccttcatcttttgaatatatgtaaggacattctttgagcaggcataaaaatattttttacaacaattattttcagtgtggcaggcgctgctgatttttttacaaaaacaatcttgacagtgacattgaaagctgcataataacattaacagaacccaccacgcctctgatttttcatgcgcaacccggtgggactttcttatttatggggtgttttatgtgacaagagatgaaaatgaatattcacaaaaataagatgctatggtataatacaaggtactgtattagggcttcttatgagaggcgctgaaatatgggaaaagatttaaaaggttacaagaatgaaatcagtatcgttttatactacaaaccggattgcgaacaggcgaattggtaggattgaaatctaaggatttataggaggaatatagaaagatgaaacttggaatcgtaggattaccgaacgtaggaaaaagtacactgtttaactcactgacaaaggccggtgcagaatctgcaaattatccattctgtacaattgacccgaatgtcggtgtcgtaacagttccggataagagactggatgtgcttggagagatgtatcatacaaagaagatcattccagcagcaattgagtttgttgatattgcaggacttgtgaagggagcatccaaaggagaaggacttggaaaccagttccttgccaatatccgtgaggttgatgcaatcgtacatgttgtaagatgcttcgagaatacgaatattgtgcatgtagacggaagtattgatccgctgcgtgacattgagacaatcaatcttgagctgattttctcagatcttgaggttcttgaaagaagaatctccaagacagtgaagctttctagaaatgataagatggcggcgaaagagctggatcttcagaaccgtttgaaagcacatctggaagagaataagatggcaaagagcttcgtgacagaggatgaggatgagcaggcatggcttgccgagtacaaccttctgacagcaaaacctgtaatctttgcagcaaatgtatctgaggatgatcttgctgatgatggtgtgaacaatgcaggggttcaggcagttcgtgagtatgcaaaagaggaagactgcgaagtgttcgtagtatgtgcagaaattgaagaagaaatttctcagttagatgatgatgagaagtccatgttccttgaagaccttggattagaagaatccggacttgagaagctgatcaaggcaagctatcatcttcttggactgatcagttatctgacagcaggggagccggaagttcgtgcatggacaatcaagaagggaacaaaggcaccacaggcagctggtaagattcatacagactttgaacgtggatttatccgtgcggaagtagtaagttatgatgatctgatggcatgcggaactcatgcggcagcaaaagaaaaaggattagttcgtctggaaggaaaagactatgtcgttcaggacggagatatcatgctgttcagatttaacgtttaacagatatagggaatatgcttgaaaaccagttagattcattgttttctaattggaaaagcagtaaaaacaggaatcaggaacaactggatttgttcctgatttctgtggatatgaaaggaaataacataatatgcattacaatatcagctttccaaatttagggatttatctggatcatgtaggaaaaagcatcagcatctttggattttcaattgcttactacggcatgattatcggtgcggcaattttgattggatttttgattgccacagtggaagcaaaaagaacaggacagaatccggaagactatctggatatgggaattgtcggagtaattgcaggaattgcaggcgcaagaatctattatgtgattttctcctgggatttatataaagataatcttttgtctatctttaatctcagagaaggtggtctggcaatttatggtggcgtgatcggagcagtgatcgcagtttttgtgatggctgctgttaagaaaaaatcaccatttcagattttggatacaatcgcactggcacttctgaatggtcagatgcttggacgttgggggaatttctttaacagggaagcatttggagaatatacggattgtctgtttgcgatgaggcttccggttgatgcagtaaggccggaagatatcacagaacttatgcgtgagaatatgcagagaattgatggagtcagttatatccaggtacatccgacatttttgtatgaatcattatggtgtgccggactgcttattatattgtttctgtataggaaacataagaaatatgaaggtgagctctttcttatgtacctgtttggttatggggcaggacgcgtgtggatcgagaggcttagaacggatcagcttgttcttccggggatcggatttccggtgtcagaacttctggcaggttgtctggtgattatgacaggaattatgctgatctattgcagaagacattgcagaaaaaaaaacgagaagaaaaaagtggatcagtatgagccggtgccaacaaagatcaaagggaaaaaaccaccgaagtgggatgaccggttgtttaagaatagatagaataataagaaaaaagtatagtgattcataagtcagaagagttaatgttcaacagaaagaactcttctgactttttctatttctgcctgttttagttaataatccccaataccagcactgataactattctcaaaacaatactctgtacacgaaaatatacaaaagaggatatttataactctagacttttgtgacttttggagatataatgaaactacatgtgaattaattatacttaactcagtgtaaaacctatgtaacacctaaggaggaataaaaatggcaagaaaaatgaagaccatggacggtaatcaggcagcagctcacgtttcttatgcatatacagaagtagcagctatttacccgattacgccttcatccgttatgccggagcatatcgatgagtgggctactgaaggaagggagaacattttcggacagactgtacaggttacagagatgcagtccgaggccggagcagcaggtgctgttcacggatcattagcagcaggtgctcttacaacaacatttactgcttctcaggggctccttcttatgattcctaacttatataaggttgctggtgagcagcttccgggagtattcaacgtatctgcccgtgcacttgcaagccacgcactgtcaatttttggagatcattctgacgtttatgcatgtcgtcagacaggagcagctatgctctgtgaatccagcgtacaggaagtaatggaccttactccggttgctcattgtgcagcacttgaaggaaagattccattcatcaacttctttgatggattcagaacatcacacgagattcagaaaatcgagacatgggattacgaagatctgaaagacatggtaagcatggaagcaatcgacgagttccgtgcacatgcacttaacccgaatcacccatgccagagaggttcagctcagaacccggatatcttcttccaggcaagagaggcttgtaacccattctatgatgcacttccgggaatcgttcagaagtacatggataaggttaatgagaagatcggaacagactacaaactgttcaactactatggagcagaagacgcagagcacgtgatcgtagctatgggatctgtatgtgacacaatcgaggagacaatcgattacctgacagctgcaggagagaaagtcggagttgttaaagttcgtctttacagaccattcagcgcagaagctctgatcgacgctatcccggatacagttaagaagatttctgttcttgacagaacaaaagagccaggagcacttggcgagccactgtacctggatgttgttgcagcacttaaaggatctaagttcgatgcagttccggtttacacaggacgttatggacttggttctaaagatacaacacctgctcagatcgttgctgtataccacaacgatgagaaagctaaattcacaatcggtattgaagatgatgttacacatctttcacttgatgctggtaagccacttgttacaacaccagaaggaacaatcaactgtaagttctggggacttggagcagatggtactgttggagcaaacaagaactccatcaagattattggtgataacacagacatgtatgcacaggcttactttgattatgactctaagaagtccggtggtgttacaatgtctcaccttcgtttcggtaagaaaccgattaaatcaacatacctgatccatcaggctaattttgttgcatgtcataacccgtcttatgttaacaaatacaacatggttcaggaacttgttgatggaggaacattccttctgaactgcccatgggatatggaaggacttgaggaacatcttccaggacaggtaaaagcttatatcgctaaccacggaattaaattctacacaatcgatggtatcaagattggtaaagagattggacttggcggacgtatcaatacagttcttcagtctgcattcttcaaacttgcagctatcattccggaagaagaagctattgaccttatgaaagcagctgctaaggctacttacggaagaaaaggtgacaagatcgttcagatgaactacgatgcaatcgatgctggtgcaaaacaggtcgtagaagtagaagttccggaaagctggaaagatgcagctgatgaaggacttgctacaccacacatcgcagacggcggaagaactgatgcaattgcatttgctaagaatatccaggcaaaagttaacgctcaggaaggaaatacactccctgtatctgcattcaatgattatgttgatggatctacaccgtcaggaacatctgcatatgagaaacgtggtatcgcagtagatattccagtttggaatccaaatcagtgtatccagtgtaaccgttgtgcatatgtatgtccgcacgcagttatccgtccggtagctctgacagaggaagaagctgctcaggctccagaaggacttaagacacttgatatgatcggaatgccgggaatgaagttcacaatgacagtatccgcttacgactgtacaggatgtggatcttgtgtgaatgtctgcccaggaaagaagaataaagagacaggcgaagttgagaaggctcttacaatggctaacatggaagctaatgcaggagagcagacattcttcgactttggtagagagattccggttaaaccagaagttgttactaaattcaaagagacaacagttaagggaagccagttcaaacagccactccttgagttctcaggagcttgtgcaggatgtggcgagacaccatacgctaagctgatcacacagctgtttggtgatagaatgtatattgcgaatgcaacaggatgttcttctatctggggtaactcttcaccgtctacaccttacacagtaacaccggaaggtaaaggacctgcatggagcaactccctgtttgaagacaacgctgagttcggatacggtatgctgcttgcacagaatacaatcagagaccgactgaaagcaaaagttgagaagatcgcagagaagactacagatgaggcagttaaggctgcagcagctgagtatcttgagacatacacagtaggcgctacaaacggaacagctacagacaaacttgttgcagctcttgaagcactcgattgcgattgcgaagagagagcagaagttctgaagaacaaagatttccttgctaagaaatcccagtggatcttcggaggagacggatgggcttacgatatcggatacggcggagttgaccacgttcttgcaagcaagaaagatatcaacattatggtattcgatacagaggtttactccaacacaggtggacagtcctctaaggctactaagactggtgctacagctcagttcgcagcaggcggaaaagagactaagaagaaagaccttgcaggaatggctatgacatacggatacgtatacgtagctcagatcgctatgggtgctgacttcaaccagacagttaaggcaatcgctgaggctgaggcttatccgggaccatcactgatcattgcttatgctccatgtatcaaccatggtatcaagaaaggtatgagcaaagctcagacagaggaacagctggcagtagagtgcggatactggaataacttccgttacaacccggctgcagagggagacaagttctcacttgacagcaaggctccgaaggcagaaggataccaggacttcctgaatggtgaagtacgttacaacgcactgaagagagctaacccggctaaggctgacaagctcttcgctctcaatgagcaggaagctatggagagatatgattacctgaacaaactggtaactgtatacgctgcagaaaaagaagataaataaggatatttcatgagtaaatgagatatgaaaagaggagatctccgtaaggggatctccttttgcgtgaaaaaataatggatgttaacctgtttcgcaatttttgattacagtggtgcgcgaagatatttcttcggtgtcattcctttatattttttaaaggttttgataaagtagcttacatcgttaaatccacagctaagtccgatgtctgcgattgattcattcgaagtaacgagcttgaaacaagcttgttctattctatagtaattcagatagtcaacaggagttctatgggtcatatctttaaagtagcgacagaaatattttgaattcataccggcggcctgagacagatcttccagtgtgatacagtcagcataatggttttcaatcacttcaagagctttctttaaatgttctatttttcggctatccttttgactgatgattcgaacgttttcatacaatttattttccagaatatagcctaagaattcgtacagagtaccaatcaccataagctcgtgcccttcagtacgctttttgatatgttcaaacatcatggaggtgatatgctctaaattctttacgggtgctttgataagggaagggatagtcagagtgtcacttccgatcttcttaagcagacgttcgctggcatgatttactgccatgagcgattcaaggttaaaaacaaggcattcatagacacaatccttaggaattccaccatgaagaagccctccttttataaaaataaggtcgccggctactgcagtgaattcattttcaccaattgacataagtaatttcccttttaaaacacgaataagttcatattcgatgtgccagtgataagacatttcataccgtggatgattcggcgtaacatgataaaattcaattggaaaatcaatggttccgtgattacgttcttctctgtaattgatgtatttcatgcaataatctcctttaaaaatctaaatagtgtaaaaacaaacatatatgtggaaatatatgtttataaattgtactttgttgtataaaaggtgaatatctttatatttttattctagtataccacaagacaaaaagaaaggaaagaactataatgatactcaaagaagcggttctgcgaaggaagataagcagagcaaggcaaacaattaaggaggaatgtaattatggcagaaagaagattagtaggatcttatccagtaattggtatcagaccgacaatcgatggacgtagaggagctcttgacgtaagaggatctcttgaagagcagacaatgaacatggcaaaatcagcagcaaaactgtttgaggagaacttaagatattcaaatggtgagccagttaaagttgttatcgctgacacaacaatcggacgtgtaggtgagagtgctgcttgtgctgataagttcagaagagaaggcgtagatatcacagttacagttacaccttgctggtgctacggagctgagacaatggatatggatccacagacaatcaaagctgtatggggattcaacggaacagagagaccaggagctgtataccttgcatctgtacttgctacacatgcacagaagggacttccggcattcggaatttacggacatgacgttcaggaagctgacgacacaacaattccggaagacgttaaagaaaaacttctcagattcggacgtgcagctgttgcagcagcatccatgagaggaacatcttaccttcagattggatctgttacaatgggtatcggtggatctatcatcgattctgatttcatcgagtcttaccttggaatgcgtgtagagtctgttgacgaggtggaaatcatccgtcgtatgtcagaagagatctatgacaaggctgagttcgagaaagctcttaaatgggcaaaagagacttgcaagattggttgggataagaacccagaagagcttcaggcttctccagaggagaaagaggagcagttcgagttcgttgttaagatggcagttatcatcaaagaccttatgaatggaaataagaaccttgatgagaagttctcagaggaagcaatcggacataacgctctggcagctggattccagggacagagacagtggacagacttctatccgaacggagacttcgcagaggcagttctgaatacatctttcgactggaacggagctcgtgagccatacatccttgctacagagaacgacgttctcaacggacttggaatgatgttcatgaaacttcttacaggacgtgctcagatcttcgctgatgttcgtacatactggagcccagaggcagttaagaaagctacaggatatgacctcgaaggtgttgctaaagagaacggtggattccttcacctgatcaactctggagcagcttgtcttgatgcatctggtgttgctaaagacgagaatggtaacggcgttatgaaagaatggtggaacgttacagaagaagaccagaaagcaatcatggatgctacagagtggtgcatggctgacaacggatacttccgtggaggcggatactcaagccgttacgagacacgtgctcagatgccagctacaatgatccgtcttaaccttgtaaaaggccttggaccggttcttcagattgcagaaggatggacacttgaacttccggaagaagtatctgataagctttggaaacgtacagactacacatggccatgtacatggtttactccaagatgtgatggtaaagagggagcattcaagacagcttatgatgtaatgaacaactggggagctaaccacggtgctatctcctatggacacatcggagctgacctgatcacaatgtgttcaatgcttcgtattccagtatctatgcacaacgtaccggagaaagatatctaccgtccggcagcatggaatgcatttggaatggataaagaaggcgctgacttcagagcttgtaagaactacggaccactttacaaataagaaggagtccttttgtcagaaaatgtaaaaagactgtaaatacagtttcgatacagagctagaacaaagaatgcggggggtctgcctatgcagggcccccgttttaataccgactaaaagagtattaagaaaagaggaagattatggagaaaaaagtattagcatttgactttggtgcttcaggcggaagagcaatgtgcggaacttttgatggtgacaagatcagcattgaagaacttcaccgtttttctaacgatccggttatcctgaatggatcaatgtactgggatgtactgagattattttttgaaatcaaacagggtctgatcaaagcaaagaaatgtggaaagatcgaaagtatcggtatcgacacatggggagttgattttggactgatcgacgaggaaggaagacttcttgagaaccctgtacattaccgtgatgcacgtacagaaggaatgatcgaagaaagtttcaaactgatcgataaagagaaattttaccagatcacaggaaatcagttcatggatctcaacacagcattccagctcctttctcttgtaaagacaagaaaagagcttcttgagaaagctgacaagatgattttgatgccagaccttttcaactacttccttacaggggagaaaaaagctgagtattctatcgcttctacaacacagcttcttgatgcgaaaaagggtgagtggtcagacgaagtgatcgaagcactgggaattccgaaacatattttcccggaaatcgtacctacaggtacaaagatcggcactcttacagatgaaatctgtacagagcttggtctggataagattgatgttatggctgttgcaggacatgatacgcagagcgcacttgtatctgtaccaacatcagaagaagattttatcttcctgagttgtggaacatggtcactgcttggaacagagcttgcagaacctatcatcaatgagaaatctgagcattacaacatcacgaatgaaggtggatatggaagaaagatttccttccttaagaatatcattggattgtggtgtattcaggaaagccgtcgtcagtggatccgtgaaggaaatgagtacggatttggcgagcttgagattatggcaaaagaagctccggcacttcagagctttattgatccggatgcaccggaattcacacctgccggagatattccgacaagaatccgtgaattctgcaagaagacaggacagcctgttccggaaacagttggagaagttgttcgttgcatcaaccagagtcttgcaatgaaatatcgtcatgcgatggaagagattaaagagtgtacaggtaaagattataagacagtctacatggtaggcggtggaacacagagtgctcttctttgccagttcacagcaaatgcatgtggatgcagagtaagtgcaggccctatcgaggcaactgttcttggaaatattgcactgcagctcatggcttccggagatatcaaatctatcgaagaagcaagagagattatcaaacgttctcaggacatcaagatctacgagccacaggacaaagaagcatgggacgaagcatacgagagatttaagaaaattttagtatagtgctttgaactaagggggaatgagttgtcagttgtagtataattatggcgttactgttcactcccgtgtcaattactctgctgatcgacacggaggatgcgtgttttgacttgaatgcatctcgccccatcgccaaaggcgatttgaaatggcgagatgcgttgctggtcgcacatcgtgtgaacagtaacattatggctggcaacgtaataaaaagaattcttcagaaacacttgactgtcaatctgctgtatgatttaatggaataagcagttaagttgggcaaaatgcataacggttcgctgattggcctgggaggagaagattatggctgctactattcgcgatatcaagaaaaggacaggattgtcccttgcaacgatatcgaagtatttgaatggcggtaatgtattgccggaaaatcgtatcttgattgaggaggcaatcaacgaactgcattatgaagtgaacgagcttgcaagagggcttgttacccacaagacaaagacaattggagttctggtctatgatatacagtgtctttttgtaggaagtatgctgcattatctgggaatggaacttcataaaaagggatatggaatgttgatctgtgattcctgcaatgacgagaagctacagaaagaaaatttgcagtttcttcttagcaggaaagtggatggaatattggtatttgctgtaggaatgcatgggaagtttcttcatgctgcgaaaaaagcaaatgttccggttgttctggttgacagatcatttcaggatgaagaatatgattgcgttgaggttgataaccggacagcaatctatcgtgcaacgaataaattaattgagaaccatcacaagaaaatagctgtgattgcctctaatattgaatataccggaagggaacgtgtgaaaggatattctgatgcgatgaaccaggcgggactggagattccaaaagaatactgcaagctgggaaggcattcttttgaacatgggtacagaggaatgaaagaacttttggagcttgaagaccgtccgaccggtgtgatcttaggaaactataacaccatgcttggtggaattatggcattgaacgaatcaggactctcctgtccgcaagatgtctcacttattggagtggacaatcttccgatgacccaggtgctgcgccctaaattatggctgattgtccagccaatggaaacgatgtgcgagaaggctgtagctatgctcctggagcgagtaaatggagagcaaaacggtatgccggtaaaaattagtttcagtacctctgtaagagagggagactcaatacgagaccttggatagtgcataagcaaaatgcacagaaaagcgtgtgttttgttgcgaaaatggatgaaaaaatagtgaaaacaaacaaaaacgaaccgtttcgccctaaaaacggtggggaatcttgacaaaatgtggaaacaaagctataatttattcatgtatcaaaggtgtgcggggaaatcgaaaacacactttgaaaaacaaaaaatcttaaagctttgaaagcgaaccgttacgctgaggttaagaggaatgggggtatcgtaagagttaatcgacaatccagtcaacaccagcaaagtaaaagatgggaggaagaaaattggaaaaaattaaacaaaatccttttgtaaaaaaggtaggatttaacagaattgttttgtgctgtgtccttcttctgatgtacggactcttctgtgcactgaccggaggaaacttcgcaggaatgaaccgaatcatgagcgcactcaattatgcttatttccttggatttttatcactgggtgttacatttgtaattgctacaggacagatcgacttctctattggaccggttatgttctgttgtgcacttatctcaggttacacactgacaacacatggaatttcaatgccggttgcattcctgatcagtatccttgtaggatttgcttttgggctcttcaatggatacttggtagcttactggtcagtaccttcattcatcacttcaatggcaagtatgaatatcgcaaaaggtcttgcatcagtttacacaaagacacagtcagtcagctggccgcaggcagcagatccggacaacggatggttcagaaatcttgtaagatataacggattcccggtaggacttgttattcttctggttgtagcagttatctgtgctattatcctgaataagacaagaatcggacgttacatcctttgccttggtagtaacaaagaagctgttagactttcaggtgtagatgttaagaaatgggaaatgcttgcattcattatctgtggagttctcgttggaatgggtgctatcttctatgtatctgcatatacaacagtacagcctggttatggagatcagtacaacaacgaagcaatcgccggatgtgtaatgggtggtacatccatggcaggtgggcttgcatccatcagcggtacaatcattggtgtatttatcatcgctcttcttcaggaaggaattctggctcttggctttacaaaagattatcagcttatcattacaggtgttattgttatcgtcgcagtattcagtgacgtacttgcaagacgcagaaagaactaatttctcttctataataagagatcagctttatgaatgatgaacgaaatgtttgattgaaagaaaggcaagggtaataaaatgggcgaagttatattggaaatgaaagggattgataaatctttcccaggtgttcacgcacttgaccatgtagatcttgagatcagaaaaggcgaagttcttgctcttatgggagagaacggtgccggtaagtcaactctgatgaaagttctcacaggtatttatacaaaagattcaggaacaattacatatgaaggtaaagaagttgagttccatagtgctcgtgaagcgcaggacaatggtgttatcatcgtacaccaggagctgaacatgcttggtcatctgacagttgctcagaacatcttcatcggaagagagttcaagaagggtatcaagatcgatgacaagaagatgaacgaagaagcacagaaactgttcgacagaatgaacgttgatattgatccgagagagacaatgtcaaaacttacagtaggtaagcagcagatgtgtgagatcgcaaaagcaatttcacatgatgcaaagatcatcatctttgacgagccatcagcagctctgacagagacagagatcgagcagttgttcaagatcatccgtgacctgagaagtcagggaatgggaattgtttatatctcccaccgtatggatgagatcaaagtgatcacagaccgtgttacagtcatgagagatggtacttacgtcggaacattgatcacaaaagaaagtacaaaagacgacatcatcaacatgatggttggacgtgttatttacgaagatccgaaggagaagaacatgacacctccgggagcaccggttgttcttaaggtagatcatctgaacgcaggtaagatggttcaggatgtaagctttgaacttcacaaaggtgagatccttggattctccggactgatgggagctggacgtacagagacagccagagcactctttggagctgacccgattgacagcggtgatatttatatcaatggtaagaaggttacaatcaagagtccacaggatgctgttaagtatggtatcggttatctgtcagaggatagaaagagatatggtattgttgtacagaaatcagttgctgagaatacaacaatggcaacacttgaaaaattcatgagcggtccttttatcgataagaagaaagagaacaagattgctcaggaatatgttgagcagcttgcaacaaagactcctggtacagatcagctggtagttaacctgtcaggtggtaaccagcagaaagtcgttattgcaaaatggctgacaagagactgtgacatccttatcttcgatgagcctacaagaggtatcgacgttggagctaagaatgagatttacaagctgatgaatcagctggcagcagaaggaaaagccattattatgatttcctccgagatgacagagatccttcgtatgagtgacagaatcgttgttatgtgcgaaggtaagaagacaggtgagctggatatttccgaagctacacaggaaaatatcatgaacatggctacacgtgagattgagtagggagggaaaaagtaatggcaaataatacaacaaagaaggccggttctaataagtcatttattgacagaatgggaggacagaaattcatcgtcctgctcgttgttattgcactgtttatcttcttctgtgcaatgagcccgaacttcagaaaatatacaacatttattaacattctggacttctcctattatattgtcctgatggcaattggagtagcctttccactgatgacaggtggtgttgacctgtcaatcggtactggacttgtatgttattcactcgttggtggatatctgatcgttcacaaaggaatgcctacaatcgttggtatccttgcagcaattattcttggaatgctgattggtgttctgaatggtgtactggtagcaatcatggacctgccggcattcctggcaacactttgtacttgtatgattactcgtggacttggttccattatcgtaggtggattcggaatctcatggccggcagcagcagcaccgggcggatggttcagaagtatcttcaagattcagtctggcggacagaatatcccaatcggtttcttatgggtaattcttctggttgttgttatgacattcgtactgaatcatacaagaattggacgttatacacttgcaatcggaagtaacaaagaagcaacaagactttccggagttaatgtaagattctatcatattgcagcatatgtaatctgtggattcttcgcaggacttgcttctatcgcatactccgctatcttcgctacagttcagccgggaagtggtgccggatttgagcttgaggctatcggtggagcaatcatcggtggtgtatccatgacaggtggtgtaggaagcatcacaggaacactgtttggtgtattcgttatctgtcttctgaagactggtcttccattcatcggactgacagctaactggcagcagatcatcacaggatttgtcctgatcgcagccgtacttgttgatattcttaagagaaaatcaggaaaagagtaatttttttcgataagatattgagaattgtgaaaaatcacgaaaaagcaataatcaattgcaaaatcattagtaatgtgttatattattaatgtatgcggatagatagcagcggggaaacatgctgaaaaaaagtatgaaaaagaaagctgttactatagaagctaaacgaaacagactgtataaagagttttcggacaaagaagcatgggcaaactacttctgcagagcgatttaagaaatgcacgaaagaggctctgtcagagaggcccggcattagggagaggaaaactggaagaaaactcagacaagcagtcacaaatttattttgtcaggaggacataattatgaaaaagaaagttttagcagttttacttggtggatgtatggtagttggaatgctcgcaggatgtggatccaaggcaaacgacactaagacagatgacggaaataagacagaaggatcaggagattctaagggatatcatttcgaagttgttgtaaagagcttccagtcttcatactggcaggcagctgtacagggaatcaaccaggcttgtgatgagctcggtgttacagctaacacaacaggaccaaacgcagagtccgatatcgctgaccaggttaacatgctgaacaacgcaatcaacaaagatccagacggaatcgctcttgcagcttgtgatcagaactcagttattgattcactcaagacagcacttgagaagaaaatcccagtagtatgcttcgactcaggtgttccggacgctccagaaggatctgtatacgcaacagttgtaacagacaacgagcaggctggtggaattgctgctgagcacatctatccagcaatcaaagacaaacttggaaaaggacaggttcgtgtaggtgaagttaaccaggatgcaacatccgctaacatttctgagcgtggtatgggattcatcaacaagttcatcgaacttgctaaagctgatggatttacagtagcagttgtaggaaatgacttctatgtaaaccaggttaaagacaacggagatcaggcatctgcagacgttatccttgaagttgcagttccggctcagacaacagttgagctgtgtgctacagaggcttctaacatcatgaacaaagacgatacaatcgctatgttcggatcaaaccaggtatctgctgagggtgttctcacagctaaccagaacctgaacaaacttggaacaggcgaaggaaagatcatcggtgctggattcgatgctggtgcagttcttaaagcagctgttaaagatggtacaatgctcggtgctgttacacagtctcctctgatgcagggtaaaatctccatcgagactcttgctaagatctgtgatggtgagtctgtagaagacgttacaacagatggttactggtatgattctacaaacatggaagatgctgacatcgttccaaacctttatgactaattcatatctgtaaagagaagctgaattattaaagtgaaaagaaaggaatcgggaaattcccggttccttttttaaaataatatgttattatatcaaggaggaagataatatgttaaaaggaattccaaaaattttatcaccagaactgttgaaagtacttgctgagatgggacacagtgacagattggttatctctgatggaaactttccggctgaatcaatgggaaaagacgcaattgtgatccgttgcgacggacacggagtgccggagattcttgatgcgattcttcaggtgttccctctggacagctatgtggagcatccggtaaatcttatggaagttatgcctggagatactgtggagacaccaatctgggatacatataaagagattatccgtaaatatgatgacagaggtgatgctgttgttggaaacattgagcgttttgcattctatgatgaagcaaagactgcttatgcgatcattgcaacaggtgaatcagcactttatgcgaatgtaatgcttcagaagggtgttgtaacagactagtcacatttttcaacgtaatggaggaacaatatgcttgatcatgtagaaaaaatatttgcagatatgaagccgatgatgaaaaagttgaagaaggcttcttataaagtaaatatggaggcttttatagagaatcatggacattatttccgtgagatgacagaatatacggagaatgcttctgataaagagacggcagccaaagagcttgcagtagactttacagataaggtttatgatgcatatgtttctccgaaaaaaggaaaaatagacagtgcaattcagacagatctgaatttctttatgatctattatgtatttccggcaattcttttgacagagcatgacgatgcgaaactgatcgcagatcatctttgcagcagatggggagaaaagtttaagaacagtaagattcagtatacagattatgattccctatatgtttcattccgtgagaagatatttggaatcttttaatacttgcaaatcaaccttacttgtgatagaataattaagattcatgtaatggcatgagaagattttagaagctatattttatggtttaataagtgtgctgttacgttagtgtgtaggaggtcatagaagatggacattttgaagattgttttatacattatctttgttatagactgtatcgcattatcagcgattattcttttgcaggaaggaaagtcagctggattgggaacgattggcggtatggcggatacttactggggacagaacaagggacgttctatggaaggtgcacttgtaaagtctacaaagtttcttgctattcttttcctggtgcttgcagtagtactgaaccttaaggtttttaattaataacagatgatgaagtaagtataagacattctataataagactatagaatgtctttttttactttgagtaaagatgaaaggaaacagaatggatcagacatttgaaaagagaaaaaaagtgatttatgactttatttgtgatgatttttatatcccaatgaaagtcaaagagattgcgacggttcttcaggtatcgaaagaacagagaagagagcttcaggaagtgttggatgcgctcgttgaagaaggaaagattacactttctaaaagagggaaatacagtaaaggtcaggcaaagcgtatcacaggaaccttccaggcgaatatccgtggatttggatttgttatggtagagggtgaagatgaggatatctttattccgggagagaatgtgaacggtgcattccagggagatgaagtggaatgtattatcacaggtgcgccgggaggtaagagaaaagaaggaaaaatcgtaagaatcgtgtcgcatcaggtgaagaagattgtcggattgtatgagaagagtaagagttttggatttgtacgtccggataatcagagatatctgaaggatatttatattccggccggaaaagagatggatgccatggacggtcataaggttgtggtagaactgacatcttatggacaggaacatgctaagccggaaggaaagattgttgagatcatcggtcatgtgaatgatccgggagcggatattttatctattgtaaaggattatgatcttcctacagaatttccggagaaggtattgaatcaggcggttcgtgttgggaaagatgtatccgaagcagattgtgccggaagattggatttacgtgactggcagatggttacgatcgacggtgaagatgcgaaggatctggatgatgcggtttctttgataatgaaggatgagaattatcagctgggagttcatattgcggatgttaccaattatgtacaggagaaaagtgccctggatcgagaagcactgaagcgtgggacgagtgtttatcttgctgaccgtgtcataccgatgctgccacatgtgttgtcgaatggcatctgttctctgaatgcaggggaagaccgtctggcattatcctgcattatgacagtgtctccgaaaggcgaggtgatcgatcatcagatcgcggagactgtgatccaggtagataagcgtatgagttatacaggtgtatctaaggtgctggcagaagaaccagaagcactgaaagaagatgaggattttgttccgatgattcagaagatgcaggaactttcaacgattctcagagaacgacgtggcaagagaggttcgattgattttgattttccggagacaaagattgaattggatgagaaggggaaaccaattaatatcaaaccttatgagagaaacagtgcaacgaagatcatcgaagattttatgcttcttgccaatgagacggtggcagaagaatatttttggagagaggttccatttctctacagaacgcatgaagttccagacgaagagaagataaagaaactgagtacatttatcaataatttcggttatcatattcatgttcatgatgaagtaaagccaaaggagattcagaaacttcttagtcaggtggaaggaaccccggaagaagctctgatcagcagacttacattacgctccatgtgtcaggcaaaatacacaacagagaatacaggacactttggattggcagcgaagtattatacacatttcacttctccgatccgccgttatccggatctccagattcacagaatcattaaggagaatctgcgtggacgattgaatgagaatcgtatagaacattatgacaagatcctcccggaagtagcgaaacagtgtagtgacagagaacgactggcagaagagacagaacgtgaagttgtgaagatgaagaaagcagagtatatgcgcatgcatattggggaagagtacgaaggtgtcatttccggtgttacaaaatggggaatctatgtagaacttcctaatacagtggaaggtcttgtccatgtcgtggatctgcgggacgatcattataattttatagagcagacatatgaaatggtcggagagcatacaggaaagacatataaacttggtgaaaaggtgcgtgtccgcgtaagtgatgcagataagctgctccggacgattaatttcgagctggcataatacttgcaggagtgcggttaaaatagatgagttagaggttggaatcagatggcaaagacagagaaaaaacttattgcgaataataaaaaagcatatcatgactattttattcttgagaaatatgaagcaggacttgtgctgcatggcacagaagtaaagtctcttcgtatgggaaagtgtagtatcaaagaagcatttatccgtgtggaagacggggagatgtatatctatggtatgcatatcagtccttatgagaaggggaatatctttaacaaagatccgcttcgcgtgagaaagctgcttcttcataagaaggagatactgaaaatatttggtaagatgaaagaacagggaattacagttgttccgctgcaggtttatttcagcggaagtcttgtaaagattgagattggacttgccaaaggtaagaaattatatgacaagcgtgagacgatcgcaaagaaagatcagaagcgtgaagcacagagagaattcaaagcgttcaatcgataaaggattgaggcaggagcgaatagaaaaagcaattggatcagaaaccaattgctttttttacttcattgatatcgccagtaaatacaagtccacccattccggcttcttttgctgcattgatgtttggctcaagatcatcaataaagaaacattcttctgcctttaaatcaaatttcctgagaaaatgactgtagatttcaggagacggctttgcaagtctgatcggtccggaaaataagattccgtcaaagtgagaaagaagttcacttccttcatagtattctgcaaaataggttggagcattagacagcagatagattggtatattgcgctcttttaattcatggataaatgtaatggtatccggaagtaaagtagtgcagcgtggccattcttttgcaaaccggcggatgcagtccttcaaatgttccggaacctgatcgatgatttcatctatgtaacaatcataatccagtgtgccggcgtcaagctctgcccagcgtttataaacgatttcggataaatgatccagttcttcttcatatgggcagaattctgaaagaatcgcttttccatcaaaacgtccgatgacatttccaaagtcaaaaacaatattcttgtatttcatgacaaatttcctttctgaacagttacgtttattttattatactgcgcagaaaagacagattcaaataaaatatgcattgatgttcacacgatgtgcgaacagtaactaatagacaaaaagagaaaatctgtctaaaaattatcttgacatctattttatttgtgatatactttgagagtcaaagtatttaaaggtcaaagcaattatggttcagatctggaaagaatcatactgtgaagagtgacaattattttgacagagttggagaagagatatgataggaagaatatgcgggacaggatcgtacataccgtcccatcgaatggacaacgtggaattgtcctctctggtcgacacaagtgatgaatggatccgggaacgcacaggaattcaaagccgacatctcgcaaaacaggagacggtatcttttatggctgcaaaagcagcagaagaagctcttgcagacagcgggctgaaagcagaaaagattgacctgatccttgtagcgacgtcttcttcagaaacagtatttccgaatacttcctgtgaagtgcagaaagcaatcggtgcagttcatgcatggggatacgatctgaatgcagcctgttcgggatttattctcgcattgaatacggcgcagtcttatatccgttcgggtcttgttaagactgcactggtgatcggtgcagagaagatgagcagaattgtagactggaaagaccgtggaacttgcattttattcggagacggtgcaggtgcagtggttctccggggagaagaaagtgaaagcgcagaagcggtctacacggccatggcacattcggcaggagacaagggagaggcattgaccttacaatatggaacagaagaaacgccggtaattcggatggatggacaggcagtttttaagttcgctgtgagaaaagtaccggaaatcatcgaagaaatgttgaaaaaagcagaggtttcaagagaagatgtggattactttgttttgcatcaggcaaacagaagaatcattgaagcggctgcaaagagggttggcgtagaaattgagaagttcccaatgaatcttggtgaatatgcgaatacgtcggcggcatcagttccaatccttttaaatgaaatgaatcgggatggaaagctgaaaagaggtcagaaaattatacttgccggattcggggcaggacttacatgggcaggatgcctggtggaatggtaaattcaagaaaggaaaacaaaatcatgttagaaaaagtaaaagaaatcgtagcagagtcattaaacgtagaggaaagcacattaagtgagacaacatctttcaaagaggatcttggagcagattccctggatctttttgagatggtaatggcatttgaggaagcttttgaagtagagatcccatctgaagatctggagcagatcacaacagtgggtgacgttgtaaaatatatcgaatcacacaagtagaagtatagaacaagtagaaaacgaagcatttcggttccttttcggcagccgatccgagagaaccgttgatagagaagtgatcaagaagggagttcttatgagaacgagaataacagaattacttggaattgagtacccgatcattcagggcggtatggcatgggttgcagaatatcatctggcggcagcagtttcaaatgccggtggacttggactgatcggaacagcaagtgcaccggccgagtgggtcagagaacagatccgtgaggcaaagaagctgacagataagccgtttggaatcaatattatgatgatcagtccttatgcagatgaagttgcaaaggtggctgtcgaagaaggtgtcgcagttgtcacgaccggtgcaggatctccggaaaaatatgtaaagatgtggaaggaagccggaatcaaagtgattcctgtagttgcttctgtagcaatggcgaagagaatgcagcgttgtggagcagatgctctggtggcagaaggaacagaagcaggcggacacatcggtgagaatacaacgatggttctcgttccgcaggttgtagatgcagttgaaattccggtgatcgcagccggaggaattgcagatggaagaggaattgcagcggcatttatgctcggagcagagggtgtccagatcggaacacgttttgttgtgacagaagaagcacaggtgcatgagaattataaagaatgcattttgaaagcaagggatattgattctcgtgtgacaggaagatctacaggtcatccggttcgtgctcttcgtaataaaatgacgaaagagtatcttgagaaagaacaggcaggagcaacattcgaagaacttgaacatctgacactaggaggactcaggagagctgttgttgatggagatgttcagagcggaagcgtgatggcagggcagattgcaggtatgatcaaggagaagcttacctgtcaggaagtgatccaaaagctggtctcacagacagatgaactgatcggaggaaaaggattctatgagtaagatcgcatttattttcccgggacagggagcacagaaagccggaatgggaaaagatttctatgaaaacagtaagacggcagtagaggtgatcgaccgtgcaagtgaactgcttggactggatatgaaagcactctgttttgaagaaaatgatcttctggatcagacagaatatacacaggcagcacttgtgactgtctgtatggcaatggagaaggtattaagagaacggggactcgccccggatgtcacagcaggcttaagcctgggtgaatattgtgcgattgcttcagcaggaggcatgagcacagaaaatgcaatcacaacagtaagaaaacgcggtattctgatgcagaatgcagtaccgggtggtcagggagccatggcagcggttctcggactggatgccggaaagattgaggaagtgctggcagatcgaagtggtgtaatgatcgccaactacaattgtccgggacagattgtgattacaggatggaaggaagatgtggaacaggcagcagatgcactgaaggaagccggagcaaagagagtccttccgcttaatgtcagtggaccgttccattcttctctcctggagcaggccggagaagaacttggaaaagaactggaacaggtagatttttctgatctccagatcccatacgtgacgaatgtgacagcagaatatgtaactgatattacaaagacaaaagaactgcttgcgcgtcaggtggcatcttccgtacgctggcagcagagtatggaacttctgatcgcggacggtgtagatacatttgtcgagatcgggcctggaagaacactggctggtttcttgagaaagataaaccgtgaggtgaaagtgtataacgtcggaacctgggaagatgtagataaggtggtaaatgaattatgttagacagactgacagggaaagttgcggtagtgacaggtgcttccagaggaatcggaagagcgatcgcactgcgtctggcacaggagggcgcagcagtagtgatcaattataatggatcgaaagagcgcgcgcaggaagtgaaaacagagattgaatctgcaggcggaacagcacagatcatgcagtgtgatgtggcagatgcagcatcttgtgatgagatgtttcagacaatcattaaagaattcggaagaatagatatccttgtgaacaacgcaggaattacaagagacggactgcttatgaagatggcagaagaggattttgatgctgtgatcgatacgaatctgaaaggaacttttcattgtatgcgtgcagtctcaagacagatgctgcgtcagagatccggaagaattattaacctgtcttctgtatcaggagttcttggaaatgcaggacaggctaattattctgcatcaaaggctggtgtgatcggactcacaaagagtgcggcaagagaactggcttccagaggaattaccgtaaatgcgatcgctccgggatttattaacacagagatgacagaagtactttcagagaaggtgaaagaaggagcaacagcccagatccctcttggaaagtttggagagacagaagatattgcgaatgcggcggcatttcttgcttctgatgaagcacgttatatcacaggccagacgctgcatgtcgacggcggaatggcgatgtaagaatagaaggagtaggaaaatgaagagacgagttgttgtaaccggaatgggtgcggtgacaccgattggaaatacagtagaagaattctggaacggaatcaaaacaggtaaagtgggaattggtccaatcacaaaattcgatacaacagattataaggttaagctggcagcagaagtgaaagatttcgttggaaaagaacgaatggatttcaaggcagcaaagagaatggaattgttctcccagtatgcggttgcagcagcaaaggaagcatttgcggatgcgggacttgatatggagcaggaagatccttaccgtgtgggaacgatcatcggttcaggtatcggaagtctcagctgtgtagagcagaattacgacaagattcagacaaaaggaccagcgcgtgtaaatccattgatggttccgttgatgatctccaatatggcagcaggaaatgtatccatccagcttggactgaaaggaaaatgtacagatgtcgtgacagcatgtgcatcaggatctaacagtatcggagatgcactccgtgcgattcagtatggtgacttggatgtctgtgttgcaggggggacagagagctgtatctgtccgactggaattgcaggatttactgcgttgacagcactgtctacaaatgaagatccgatgacagcttcccgtccgtttgatcaggacagggatggatttgtcctcggagaaggagccgggatcgtagttctggaagaacttgaacacgcgaaagcgagaggtgcgaagatttacgcagaactcgcaggatacggctctacaggagatgcttatcatatcacatccccggcagagaacggagaaggagccggaatggcgatgaaacttgcaatgaaagaggcaggtgtgacaccggatgaggtggattatatcaatgctcatggaacaagtacacatcacaatgacctctttgagacgcgtgcgatctgttatgcattaggagatgcagccgaaaatgtagttgtcaattcaacaaaatctatgatcggtcatcttcttggagcagcaggagcagtagaatttgttgtctgcgtaaagagtattctggataatttcatccatcagacagttggtacaaagaatgtagatccggaatgtggattgaattatgcagtaggcgcaccggtagagaaagaagtgaattgtgtaatttctaattctcttgggtttggtgggcacaatgtgtctcttcttgtaaaacgtttcgaagagtaaggagaagcgaagatgaagatggaagaaatattgaagctgatcgaagctgtatcggcttctacgctcacagaatttaaatatgaagaaaatggaacaaagctgaatctgaaaaaggaacagcagaaggtagaaatcgttcagaatgcggcttctattccgctgacaggaatttccggtggtgatttccaggcaactgttcttccacagaacatggctgtatccggaagttctgagaatgcagatccggaagaaaatcttgaaaaagaaccagaaggcaagctgatcatttcacctttggttggaactttctacgctgcaccggcagaggatgcaccgagttttgtcaaggttggtgacaaggtcgaagtcggacaggttgtcggaatcgtagaagcgatgaaacttatgaatgagattgagagtgaatgtgccggtacagttgcagaagttcttgtagaaaacggagaaccggtagaatacggccagccgctttttagaattgtttaagaaagggattcagatatgaatagtttaaatgtagaacagattcaggaaatcattccgcacagacatccatttcttttgattgataagattgaagattatgttccgggagaatatgcaattggatacaaaggtgtttcttatcatgaggatttctttcgtggacatttcccacagaaagcagtaatgccgggagttctgattcttgaggcacttgctcagacaggagctgtggcaatcttaagtgtatcggagaatcagggaaagattgcattcttcggtggtgtacaaaaatgtcgcttcaaaggaatggtatttccgggagatcagttgaaattagagacaaagattattaaaagaaaaggaccggtaggcgtaggagaagctgtggcaaccgttgacggaaaggtcgttgttacggcagaacttacatttatggttggagaataaaaaaaatcaggagcagaagaaatgatagagaagattttaattgcgaacagaggggagattgcagtccgggtgatccgcgcttgcagagaaatgggaatccgtacggttgctgtttactctgaggcagataaagatgcgctgcatacccagctcgcagatgaagcagtctgtataggtcctgctccatccgcagaaagttatctgaatatgcagaatatcatcagtgcgacacttgtgtccggcgcagatgcaatccatccgggattcggattcctttctgaaaacagcaaatttgcagaactgtgtgaacagtgcaagatcacatatatcggaccggattcaaaggtgatcagtgctcttggaaataaatccgttgcaagaaatacgatggtggcagcaggtgttccggttattccgggaagcaaggagccggtgtataccgtagaagaaggcgagaagatcgctggtgagatcggttatccagtcatcgttaaggcagcacttggcggtgggggaaagggaatgcgtgtcgcacagacaccggacgagttccaggcaagtttccagacagcacagaaagaagcgcagatggcattcggagacggaacaatgtatctggaacactttgtagaacatccgcgtcatatagaattccagattcttgcagataagtatggaaatgtggtccatcttggagaaagagactgttccattcagagaaatcatcagaagatgatcgaggaatctccatcagaagcactgactccaaaattgagacagaagatgggagaagcggctgtgaaagcggcgaaggcagctcattatacgaatgccggaacgattgaatttctcttagaaaagagtggagccttttactttatggaaatgaatacaagaatccaggtagaacatccggtgacagaatgggtgacaggaatcgatctgatcaaagagcagattaagattgcagacggacagagactaaaacttcagcagaaagacatcaagatcacaggtcacgcgatcgaatgcaggatcaatgcagagaacccggaaaagaatttccgcccgtctcctggaaaaatcacagatgtacatttcccgggtggtgaaggcgtacgtgtagacagtgcgatttacacaggatatgaagttccgccttattatgattccatgcttgcgaaactgatcgtacatgcggacgacagagaagaggctatccgtaaaatgagaagcgcacttggcgaagtcattattgaaggtgtggacacaaatattgattatcagtatgagattttgaatcataaaaaattcatatctggagatattgatgtggagtttatcggaggaatgatgaatgagactgcataatatgtttaaaaagaccggagagaagatcacttcgattcattcacgaaacagaagaaagccggaagcaccggaaggaatcttgaaaaaatgtaataaatgcggtgcagcaatcttaacagatgaagtaatcaacggaaaatatatttgtcctaaatgtcatggatactttcgtattccggcatataagagaattgagcttgtgacagacgcaggctcttttgaagaatgggatgcaaagatcgatgaaggggaaagaccggagaatccgttgaatttcaggggctatacagaaaaagtcgaagctttaagagaaaagaccgggcttgatgaagcggttgtgacaggaaaagcaacaatctgtggatatccggttgtgatcggggtctgtgacggaagatttatgatggccagtatgggacatgcggtaggagaaaagattacccgtgcagtcgagcgtgcaacagaggagaggcttcctgttgttctttttacctgttccggaggcgcacgtatgcaggagggaatcatttccctgatgcagatggcaaagacttcagcggcactgaaacgccacagtgatgcaggctttctttatattccggtattgactgatccaactacgggaggtgtcacagcaagttttgctatgcttggagatattattcttgcagaaccgggagctttgatcggatttgccggtccgcgtgtgatcgagcagacgatcggacagaaattgccggaaggatttcagagagcagaatttcttcttgagcatggatttgttgatcggatcgtaaccagggatgagatgaaggaagtactgggacagattctgaaaatgcatacggttacagatgaaaagaaagaagactgtccggaaaagaaaaaagagaacagaaaaaacatatctgcaggaaaagaaaatgtgtcagactgggagcgtgttctgaaatccagggaaaaagaacgcccggtcggtaaggattatattgacagattgtttacagattttgtagaattacatggagacagatattataaggatgatccggcagtagtaggcggaattgcgtattttcatggaaaagcagttactgtgatcgcccagtgcaaaggaaagacaacgaaagaaaatctggaacggaattttgcaatgccgtctccggaaggttacagaaaagcactgcgtctgatgaaacaggcagagaagttccagcgtccggtcatctgttttgtagatactccgggggctttctgcggaatggaggcagaagagcgtggacagggcgaggcaattgcccggaatctgtatgagatgtcagctttgaaagtgccggttctttcaattgtaatcggagaaggtggaagcggcggtgcgcttgcacttgcagttgcagatgaagtgtggatgatggagaatgcagtgtattcagtactttcaccggaagggtttgcaagcattttgtggaaagacagcaagagagcgtcagaggcggcaggagtgatgcgtctgacagcagcagatcttaaggaacttaaggtgatcgaagaaataatttgcgagcctgaagtgtaccgggaagatacgatggttcctgtgctctgtgaactggaagagaagatggaacatttccttgaacaatatggaagcctttcagaaaaacaactgacagatagaagatacgacagatttcgtcgaatgtaagagatagaaaacatggtattgtctgaattaagatagcagaccagaatgaaagtgatcccggaagattgaatagagaagagctgtttgaagagatcagagaacagtagaagacgaggaggaaaaaagatggatgcgtataataccatcaatgacattctggtacatttatttaatgaaatctgggagctggagaaaaaggcgatcattacagaggagtttaaagacatcacaaacaacgatatgcatataatagaagcaatcggtgtttcaggaaagacaacaatgtctgtagtggcaaagaagatgaagattacggcaggttctctgaccacagcggtgaatgggctggtaaacaagaagtatgtaatgcgtgcccgcggtgaagaagatcgaagagtggtatatatctggctgacagaaaaaggggagaaggcttactatcatcacgaggagtttcacagggagatgacaaatgctgtgctgaacagactggacgaaaaagagattccggttcttatgaagacattggacggactttcagaatttttcaggggctattcttcagaggaataaaatgataattatcaaggaaaatttgacgttttgtcaaaaatgagttacaataatccgtatcgtgaataatttatcattacggacaaaagttcttgtcattatttcgcgttaagaatcacattgtaatgaggtagtgccaatatacttgggtgtatattttaggagggaaacaagtatggtaacaaagaagacatcttcaacaacaaaagctgaaacagcaacagtaaagacagagaagaaagagacagcagctgcgaaagcaatcgagacaaagaaagacacaacaaagaaacttgaaacaaaggcagcagtgctggtagatacaccagaagttcaggcagaagaagtaaaagagacagtgaagaaggcagctaagaaggttgcagcaaaagcggaagatacagctgaaaaggctgtgaagactgtaaagaaagcagcagctaagaagacagcagccaagactacaaagaaagctgatctgaagacagaattcttccttcagttctctggtaaagagtatacagagaaagagatccttaagaaagtcaaagatgtatggacaaaggatttgaagaataaagtcggagacatgaaagatgttaagatttatctgaaaccggaagagtcagcagcatattatgttgttaatggagatacaacaggaaaaatcgatctgtaagatataaataaaagatataagatcgctttccggatgtaccgggaacaggtttacttaagaaaagacagggagtcagacacagctgaatgcaggtgaaggacggacctgtctttttaatatattaggaaagtgctttcctaatatattaaaaacgctccgcttaggtaaacatttcgccggtgcagaaggcagtgtgccttaaggtgacaggaatctggcaagtgcggtttgagaaaggagtatgcaagatgtacgagaaagagattgagcagctgcaggaaatgattgatgagagtaaccggattgtgtttttcggaggagccggtgtatcaacagaaagtaatattccggattttcgaagtgcaacaggaatttatcatcagaaatataagtattcaccggaacaggtggtcagtcatagcttttttatgaaatatccggaagcattctatgagttttataaagagaagatgatgattttggatgcgaagccaaatgctgcccatctgaaactggcagaattggagcagacaggaaaattgcaggctgttgtgacacagaatattgacggactgcatcaggcggcaggaagcagaaacgtctatgaacttcatggaagcatccacagaaattactgtatgaaatgtgggaagttctatgatgcggaatatgtgaagaattcagaaggaattccgagatgcagctgcggtgggatgattaagccggacgtagtactttatgaagagggacttgaccagaagacgatccaaggggcagtcgaagcaatttcatcagccgacatgatgatcatcggaggtacttcccttgttgtttatccggcagccggttttattgattattttcacggaaaacaccttgttgtgatcaataaatcagaaacagccagaagtgtccgggcagagcttgcaatatcggctccgatcggagagattcttggtgcgattcaggtgagtgacgaataaaaattttttttctgcaaatacttctgaaaaggaggatgctgtcagcagcagaaagaagtatgggaagaaaaaagaaaaagacgatcaatcttactaaacttgaaccggaagaaaagctgaagtatgagatagcagaagaattaggccttttagatcgcgtgatgcaggatgggtggaagtcattaacatcaaaagagacaggacggattggcggaatggtcaccggaagaagacgagagataaaaaaacagacaaaaattgcggataaaaatgatgaaagataaacaaaagtaaaattttgaatgacacagcttttgacaaataaggataaatttggtaaaatagacagaatggggagaaattattttgcgttagaattcgcagagtttttggaaagtgataactttggtggcataaatgacagaaaaaatttcaatatttgatgtggagatttcctgtatcaaggcaaaagaagcgatgatgcaggcaatcggattcatgaaagacgattccgtcaataccattgaacttgtatcgatggaatctctgatgaaagaacatgaaaatccggagtggaaaaaaaaggtttctatgcaggatctggtccttccgggaagtgtagagattcttgaggcagcgaagacggatgatgcaagattgctgcgtgagacagataataaattatttttaagaatgtttttgaaatatttgcagaagaatcatcataagatttatctcctggcagcaagtcaggaggaacttgtgaaagcagaagaagctcttgcaaggtataatcaggggattcgtgtggtgggagatgccgtgatccatccggaagacggagagctgacggatgcagaccgaatccatggaattgtgaatgcagtcaacggctcagaggcagattgtattttatcagtccttccatcgccggtgcaggaagattttattgaacagaacagggcattgatcgacacaagagtctggattggctgtggatcagttctgatgcgcagttttgatgacagaaaaatgacgagcagaataaagagaatgttagtaaagaaagtatttcgctataaagtagagaaacagaattagtttttgtgaagaatgctaaaagataaaaatgtgaatatttcatggattcgacgaagaaatgcataaaaaagatggatttcctctttctttttttgctgttttgccttaatataatataagagtatgtgtgcagataaataatgcatacgaaaaaattgtggaatatgcacatgcgtgttactacttacagtttgctgtgaccagcaatacatcgtacagagtggaggaaaaaaggatgatttcgaatcagatacttcaaaacactattgaaggattaaagggaatatcaagggttgatttctgtgtactcgacacagaaggaaaagaacttgcagcaacatttgatatggcaaaggattgtggggaagcggttctttcttttgttgaatcaccggcagacagccaggtgatccagggatgccagttctttaagatctttgatgaacagcgtttggaatatgttttgcttgcagatggcgagacagaagatgtgtatatgcttggtaagattgcggcatttcagatccagagtctgcttgtagcttataaggagcgttttgacaaagataactttatcaaaaatcttcttttggacaaccttcttttggttgatatttacaatcgtgcaaagaaattacatattgacacagaagtaaaacgtgttatctttattattgaaacatcgcacgagaaagacagtgctgcacttgataatgtgagaaatcttctgggaggaaagtcaagagactttatcacagctgttgatgagaagaatattattgttgtgaaagaactctcagataaggacggcaataaggaacttgagaagatggcgaaagagatgctggatacgctccaggcagagggaggcgacgagcagatccatattgcatacggaaccatcgtaagtgatatcaaggaagtatccaagtcatacaaagaggcaaagcttgcacttgatgtaggtaagattttctttgatgagaaggatatcgttgcttatacaacacttggaatcggtcgtctgatctatcagctgccgctgccactttgtaagatgtttatcaaagagattttcgaagcaaaatctccggatgactttgatgaagagacattgacaacgatcaataagttctttgagaacagccttaatgtatcagagacatccagacagctctatatccacagaaatacactggtatacagactggataagcttcagaagagtaccggtctggatctgcgtgtgtttgaggatgccattactttcaagattgccttaatggtagtaaagtatatgaagtatatggagacattagagtactagaaacgtaggagtatagataagttttaggaggaacatatgattgaattaaggaatgtgacgaaggagtattccaaaggtcacgcagccttgaatggagtttccgtgaagattgagcgcggagaattcgtattcatcgttggtgacagtggatcaggtaagtctacattgatcaaattgatcatgaaagagttgaatccgaccgagggtacaattatcgtcaacggccagaatttgaaccgtatgaaacacagaaacattgctaaatacagaagaggacttggagttgtattccaggatttccgtcttttgaaagatcgtagtatttatgagaatattgcattcgcattgcgcgtgactgagacaccgacccgtgtaatcaagaagaaggtaccggcggctctgtcactggttggacttgcacagaagtacaagtcattcccaaaggaactctcaggtggagagcaacagcgagtagcgattgcaagagcaattgtaaatgaacctgccattctgctggcggatgagccgacaggaaacctcgacccgacaaactcatgggagatcatgagtctgctgaaagaggcgaatgagcgtggaacaacagtacttgttgttacacataaccaggagatcgtaaacgagatgaacgagcgcgtcattactatgaagcagggcgtaatcgtcagtgatgagaaaaaaggtgggtatataaatgaggattagtacatttggatacgttggaaagcagggcgttaagaatatctggagaaacaagatgttttcactcgcatccatagcgacgatgtcagcatgtattttcctgtttggattgtttttctcgatacttgttaacttccagtatattattaaaagcgcagaagaaggtgttgcaatcaccgtattctttaatgatgacgcaacagaggaacagaagaaagagattggcgaacagcttgagtcccgtgatgatgtttcagaagtgaagtatgtgtcagcagatgatgcatgggcagaattccagaaagagtattttggagacaacccggaacttgcagaaggttttaaggatgataacccgctggcaggttcggataactatgaagtctacatgaagacggtaaaaggtgataataaggatctgatcgcgaagagtaagtctctttcagctacgcagcaggatctggttaaatttgcacagagtctggacggagtcagacaggtcaataagtcagatgttgtagcgaatacactttccagtgtgaatatgcttgttgcatatgtttcaattgcaattatcgcaattcttctcggagtatcgatcttcttgatcagtaatacggtaacaacaggtattacagtcagaaaagaagagattgcaatcatgaaatatatcggagcgaaagactttgttgtaagatcaccattcgtgatcgaaggtctgatcatcggattattcggtgcagttattccgcttgccctgttatatttcctttatgacaaggctgtagtatatattatggagaagtttagtattctgaagaatatcattacattccttccggttggaaatgtatatatttatttgctgccgattgggctggtaatgggaattggaattggattcctcggaagttacttcactgttcgtaagcacttaagagtgtaataggagatacctatgaaaagacggatgagaaaggtgacagcactggttctgtcagtcggaatgatgctgtcaatgacaattacttccggtgctgtgacaattgatgaagcgcagaaaaaagcagatgagctgcaatcacagaagagtgcagctgaggctgaaaaagatacacttgctgcgaaacttaattccatcattgaccagatgaacaagacgcaggaagaattaagtgccaaggaaactgaaatttcaacagctgaggaagagcttgtacaggcgaaggttgatgaggatgatcagtataacagcatgaagaagagaatcaaattcatgtatgagggtggtaatatccagttccttgagatactgatgtccagtagtaatattggggatcttcttaataaggcagagtatgtatcgaagctctcttcttatgacagagatatgcttacagcttttcaggatacagtaaaggctgtagaagagaaagaagcaaaactgcaggatgagtatgaaaaacttaatacattgcagagcagtctggtgagtcagcagacagaggcgcagacactgatcagcagcaaggaagcacagattgctgagattcaggatcagattacagataatgcaaatcttcttgcagatcttaaggcgaaagcagaagaagcaaaacgtcttcaggaagagcaggcagcggcggctgctgcagctgctgcggctgcaaagaagaataacagtggaagcagtagcagtggaagcagcagcagtggaagcagcagttccagaccggcttccagcggaaacgtggtgagcggaagtggatattttacacatccatgtccgggaatgacataccagtccagttatttcggagaggttcgatctttcgattcaagaccacataaaggaaatgattatgccgcaccgacaggaacacctacatatgcagcagccgctggaacagtcattacggcaggctggagcaacagtgcgggaaactgggttgttataagccatggaaatggattggtgacaaagtatatgcatcacagctcaatttgtgtgagtgccggtcagagagtagcaaaaggacaacagattggatatgttggttctacaggatattcaaccggagcacatctacatttccaggtggagcttaacggaacaccagtgaatccgaatgattatatgtaagacaaagggattcaaaatcttcctttcatgtttacatgaaagtgattcaaagaataaagggggacaaagtggaagattctgctttgtccttttctttaaataacagcgaaagggacagacaatggaacagaaaaagaaaaagggatatggagccgggattgttaccggaattcttgcaacagttcttgtcagcctgcttctccttgggggattcagggtcattacgaacacagccggcagttatgcatccggtaaagtgacagaaaaagaggtatcaaaaaaactggataagctgaatgctttgattgataaatattatctgtatgaagatgacattgatacagatcagctggcagaaggaatttattccggatatacgagtgcattgggagataagtacactgtttattatgatgaagatgagacaaaagctctgatggaatcaacaagcggaacattttcaggtgtgggtgcaacgctgacaaaagatgcggatacgggctatgcgacaattgtaaatgtctatgaagactctccggcagagaaagcaggactgaaagcaggagatatcctggagaaaatcgatgaccacgaggttggtgatgagcagcttgatacggtggtgtcctggatcaaaggggaaaagggaacagatgtaaagattacagttctcagagacggagaagaactggaactgactgccacacgagatacgatcgaagtgaagacagtttcgtatgagatgaaggagaaccagattggctatatcagagtgtctgagtttgatacagtaacgtatgaccagtttaaagaagcgttggatgatcttgaaaagcagggaatgcagggtcttattgtcgacctgagaaacaacccgggcggaagtcttgatacagttacaaatatgctgcgtctgcttcttccggaaggtacaattgtatcaacaaaggacaagaatggaaagacagacgaaatcacttgtgacggaacgcatgaatttaagaaaccaatggcagttcttgtaaaccagtacagtgccagcgcatctgaaatcttcagtggtgcagtgcaggattatggaaccgcaaaaattgtcggagtgacaacgtatggaaaaggtgttgtgcagcaattgatggatctgggagatggaacctgtctgaaagtgacgattgcagagtattatactccaaatggaagaagcatcaatggaaaaggtgttgaaccggatgtgaaagttgaataccagtatgatgaggagaatccaaaagcagataaccagctggatcaggcattaagcacagttcagggagaaattagtgaaagtacacaaaaccgataggttgaaaaagcctcattctgataaaatgttaaaatgtgtgacaattcagataaaaactcttgaaaatcaaaaaatgatgtgctaatattggaaacaagttttagcagactaaagtgctgaaccagaaaaaggcaaagaacaagactctgattcacagaaactgacaggaagttggcgtcaccgactgagagcgccggacagcggagcggattaagggaacacttgggagctggctgtctgaacagatgaagtagggcagcacgtggagcatacgttacatgcaaagagtggaatctggcttacacagggataagatttgaaatgtgaagactgagattcaatgcgggtggtaccgcggatattatgattgtaatttccgtcccgggatactgatgtatcccggggcttttttatttagaaagcttcttcccgggatgctggaatctgaaaggagaagaattatggaatttgtaacaggtgtaaaaaagaaggaaacattggaactgagtgaacttctcgaagagggaagaattggagccgaagtgaaagtaaatggtgcgatccatacgatccgtgatatgggaataattgcattcattattctcagaaaaagagaaggacttgttcagtgtgtatatgaagaaaatatttccaaatttgacttgaaagatgtgaaggaagcagatacagtagaggtaacaggtgtgcttgcagagtctgcgaaagctccgaatgggattgagattcgccttggtgaattgaagatcttaagtgagccggcagagccaatgccgcttccgattgcaaagtggaagctgaacacatctctagaagcaaaattaaactacagaccgatttctctgagaaatatcagagagcgtgcgaagttcagaattcaggaaggaatcgtaagagggttccgtgatttcctttataaagaaggatttacagagatccatactccgaaaatcggtgccaagagtgcagagggcggtgcgaaccttttccgtctggagtatttccacagaccggcgatccttcagcagagcccacagttctataagcagatgatggtcggagtattcgacagagtctttgagacagcgccagtattccgtgcagagaaacacaacacaaagcgtcatctgaatgagtacacaagccttgatttcgagatgggatatattgatggatttgaagatatcatggcaatggaaacgggatttcttcagtatacgatggagctgttgaagaaagagtatgcaagagaacttcagattctgaatatcgaagtaccgaagacagataatattccggcagtaagattcgacgagatcaaacgactggtatccgagaagtatgacagaaagatcaagaacccatttgacctggaaccagaggaagagacattgatcagccgttatgcgaaggaagaatgggatgcagattttgtattcgttactcattatccatcaaagaaacgtccattctatgcaatggatgatccggaggatccgacttacacgctcagttttgacctgcttttcagaggaatggagatcacaaccggcggacagcgtattcatgattatcatgaacttcttgcgaagatggagaagcgaggtatgacagatgaaggcatggagcagtatttaagtgcattcaagcatggaatgccaccacacggaggtcttggaataggtatggaacgtctgacaatgaagatgatgaacgaagacaatgtaagagaaacaacattattcccaagagacttaagtcgtctggaaccataagaagaaaatacaaaaacgggtcaatcctctggattgaacgaaaaaactgttggatgtgaaggtctgaactgagaaagagaactgcccacaggatgttgtggtcagaaacttaaggagtagaaacgagggaggatctttatgtttaagaaaaaagaatgttatctttgcggaggtaaattaattaatggccgttgcagttcctgcgggctggataacacaaagctagacaaaaagaattacaggctgaatgagagtagttttgaccgcaagaaaaaaatgacatattcccagaaacgacagaatgacactggagagacaaaaaaacgggagaaaaagcaggatgcgggacatctctgtgagagtcataacggacggaaaagaacgcagacagaatatcagcaaaaagaaaatccgcggatggaaatcccacagacagggcagatgcagctgggtgggccgacggtatttaatccggcaaggaaggctcatacaggatcttatgaggaacagaaaaaagcaaggaaaatcagtggaattcttgcgggaattatcgtggcaatcgtatcatttacaagcattgcaggttccgttggtgatttcatttcctcatttggggatgatttccattcctcagattatgactggaatgatgatggcagcgaagtggagtctgagtatgatccatatatgaatacaacgagagaactttctgaaacaggagcaacttatgactgtgtattaggatatggggagtatgaaatcggagcacagatcccggaagggacttatgaagtggagcttgtctcaggagaaggctccatgcagcaggatgatcctgagaattcgatttattactattcttattttagtgaagatgagtcagatacggatgcaggagattatctggacgatgtgagattgtatacaggaggtcatctgaagattgatacaggactggttgtccaatttcattctgagaatgcacagacggaacagatgcagctggaagaaaatccgctgacggagcaggtaacattgaaagccggaaacacttatacagcgggaacagatttcccggcaggatggtatgatgtgaccgaggcatcaggagtcgactgggcggagcttcattacaagatttatcttggtgatctttatgataaggaaaatgaaaatctcaattatgaaaactatggactctggttttatgatacagatggatcagaatcttatagaaatgcagttttcccggaagggacggagctggaagtggatgatggggatttaatcctgacgccgtccggctcagtaaaaaaccagaactatgacagtttctatgatatgtaccgctacaggtcgcaataagatgagaaatttatgatactgattttggaaattgtcaggattagcaaagacagagtagaaagaaaggatgattaaattggcaaataaaatatccgacgaaacaatcgagtatgtaggaatccttgccaagctggaactttcagaggaagagaaagaagcagcgaaaaaagacatggagcagatactggattatatagatacattaaatgaacttgacacagcaggaatcgaaccgatgtctcatgtatttccggtacagaatgtgttccgtgaagatgttgtgacaaacggagataacaaagaagcgacacttgcgaatgcaccacttcgtaaagaggacagttttgaagtgccgaagacaattggttaagggagtgagagtagatggatttattaaaacttacagcccttgaactgggcgagaagatcaaagcaaaagaagtaactgtacgagaagcagttgatgcagtgatcggacagatcagagaatcagagtcagagattcacagctttgtgacgatagatgaagaaggtgcttatgcacaggcagaggaaattcagaagaaaatagatgcgggcgaactgacaggtccgcttgcaggagttccggttgcggtaaaggataatatgtgtatcgaaggacagcttaccacatgcagttccaagattctttccaacttcaaaccgacctatacggctgaggcagttgagaacctcagaaaagcaggagcagttatcattggtaagacgaacatggatgaatttgccatgggaagtacaacagagacatcttattacggaccgacacgcaatccgcacaacacagcgcatgttccgggaggttcttccggtggttcctgtgcggcagtggcagcatccgaatgttattatgcacttggatctgataccggcggatccatccgtcagcctagttctttctgtggagttgtcggactgaaaccgacttatggaactgtttcccgatatggacttatcgcatacggctcttctcttgatcagatcggaccggtagcgaaagatgtatcggattgtgcggcaattcttgaggcgattgcatctcatgatccgaaagacagcacttctatggatcgtgatgattgtgatttcacagaagcgctcgttgatgatgtgaaaggactacgtattggaatcccaagagattatatgggagaaggtctggatccggaagtaaatgatgctgtgatgaaagccgcaaaagtactcgaagaaaagggtgcgattgttgaagcatttgatctgcgtcttgtaaaatatgcaatccctgcttattatacgatcgcagatgcagaggcaagttctaacctggaacgttttgacggtgtaaaatatggttatcgtacagaagattacgatggacttcacaatatgtacaagaaaacacgttcagaaggatttggtccggaagtaaagagaagaatcatgcttggatcttttgtcttaagttcaggatattatgatgcttactatctgaaggcacttagaacaaaagctttaatcaagaaagagtttgaccgtgcattccgtaattatgacatcattctcggaccggcagcaccgacaactgctccggagcttggaaagagcttaagtgatccgatgaagatgtatttgggagatatttatacaatctcagtcaatcttgcaggtcttccgggaatgagcgttccggttggaaaagacagcaaaggacttccaatcggtatgcaactgatcggaaatgtatttgaagaaaaaactttgatccgtgcagcatatacctatgagtgtgcgacaaagaagatgcatgaaacaccggcatctgtcggtcttatgtcagaaaaggaggtgcgttaacaatggcaaagcagtatgaaacagtcattggactggaagtgcatattgagctggctacaaagacaaagatcttctgtggatgcagcacagaattcggtggcgcaccgaatacacatacttgtccggtatgtaccggtatgccgggatcgcttccggtgttgaataaacaagttgtagaatatgctatggcgattggtcttgcaacaaactgtaagattacacaagtgtgcaaatttgaccgtaaaaactatttctacccagataacccgcaaaactatcagatttcccagctgtatctcccgattgccagagatggatatgtagagatcgagagtggttcaggaaagaagaaagtaagaatccacgagatgcatatggaagaagatgcaggtaagctggttcatgatgagtgggatgatacgtcacttgtcgattataaccgaagcggtgtgccacttgtagagatcgtatctgaaccggatatgcgttccgcagaagaagttattgcttatcttgaaaaactgcgtatgatcgtgcagtatttaggagcatctgattgtaagcttcaggaaggttctatgcgtgcagatgtcaacctgtctgtccgtgaagtcggatccgatcagtttggtacaagaacagagatgaagaacctgaactcatttaaggcaatcgcacatgcaattgaaggcgagcgtcagagacagattgagttgatcgaagaaggaaaacaggttgtacaggagacaagacgctgggatgacaacaaagagcattcttatgcaatgcgttccaaagaggatgcacaggattatcgttatttcccggaaccggaccttgttccgatcgtgatcagtgatgaatggatcgagaaaatcaaatctcagcagccggaacttcgtacggagaagctggagcgttacaaggaacagtttgatattccgcagtatgacgcagagatcatcacaggttctaagaaaatggccgatctttttgaggcaacaacagcaatctgtgagaaaccgaagaaagttgcaaactggctgatcggagagaccttccgtctgatgaaagacaatggaatggagccggaagatttaacattctctccggagaacctggcaaaattaattgatcttgcggaggcaggaaccattaacagttctgtggcaaaagatgtattcaagcagattttccatgaggatatagatcctgagaaatatgtcgaagaacacgggcttaagatggtgaacgatgaaggtgcactccgtgagacagctgccaaagtgatcgcagacaacccacaggcagtcgcagacttcaaaggcggtaaagagaaagcaatcggagcactgcttggacagacaatgcgcgccatgaaggggaaagcaaaccctggaatggtgaaccaggtgctgcgagagttgttaaaataaaatttgatttgtctgttaggattcctgtaaatggaacagatatatttattgacctaatattgaaattaagattgatatattgacagcctggaaaatgtctgctatattacaagtagaacacagagaaataataaactatatatgttcaaaacaataagagattcggaaggatgtggaaagaatgaaacgagattattatgaagtgcttgggctgtcaaagggcgcagaggataaagaaataaagagagcatatcgtaagctggcaaagaagtatcatccggacacgaatcctggggataaagaagcggagaagaaattcaaagaagtgacggaggcgtactctgtactgagtgatccggagaagaagaaactgtatgaccagttcggtcatgctgcatttgatcagagcggtgctgcaggttccggatatggaaatgccggtacaggtggctttggaggattcggcggaaacggcggattcaaaggcggtacttaccgtagttatggtggaccgggaagtggatatcaggagtatcattttgaaggtggcgacatggatgacatgtttggtgacattttcggaaatatgttccatggaggaagtgcttcaggtcgcagcagaaggacatcaggatttacaggaggatttggaggtgaaagctttaaatcaaaaggttctgatatcaaggcaggtatcactgtaggatttgacgaggctgcatttggtggagataaggttattactctgagtaatccggaaaatccaggacaaccgggacagtcactgaaggttcatattccggcaggtattgatagcggaaagtcaatccgtttaagaggaaagggaatgccgggaaccggtggtggtgaagccggagatcttctgttgaaagtaacagttgctccgaaacctggatatgagcggaaaggtatggatgtatatacaaccgtatctgttccgtatacaacagctgttttcggaggtgaggcattggtccatacactgtatggagatgttatgtgtaagattaaagagggaacacaatcgggttctaaaattcgtctgagaggtaagggaattgtttcgatgaaagattcatccgttcacggagaccagtatgtaacgattcagattgaagtgccaagaaacttaagtccgcaggcaagacagaaattaaaagagtttgaagaaatctgtcaggggagttcaagaacagcataaataaatgaaaagaccagaggcttgttttacaaattgaaacaagaatctctggtcttttctgctgtttagaatattgctgtagctgtttagaagttactgtgagcagtaacgttttgcacaggtacaatttatagccactgactcagaaatttgaagccagtaacaaacgaattataattgggattctgctagtcacgttcccaacgaccggaagcaccacatggaagaaccaatcctgaatctgtaacaggaagtccgatctcctgagaatctacatgtccgttccaaggttttaattcagttgagatcatgtaggtaagtacggcaggagcaagtcctgttgtataagaattcacaaggaagaacagtgcatccttggaaagaatctttgtacaaagcttgatgagtggatggatcatatcttcaatcttccagatctcgccttttggtccacgcccatatgacggtggatccataatgattgcatcataagtgttgccacggcggatctcgcgctcaacgaacttcacacagtcatcgacaagccagcggatcggtgcatctcccagaccggaagaaaccgcattctcctttgcccatgtcaccatacccttagatgcatctacatgagtaacctgcgctccggcagctgccgctgcaagtgtagcacctccggtataagcaaaaaggttcagcaccttgaccggacgtccagcattcttaatcttctcagagaaccagtcccagttagttgcctgctcagggaagagtcctgtgtgcttgaaactaaatggttttaaattaaatgtgagagaaccgtaatggatctgccactgctgtgggagactaaaaaactcccattcaccgccaccctttttgctacggtgataatgtccgttcatctctttccaaccgcggttcttcttaggagtatcccagatgacctgcgggtccggacggacaagaagataatttccccaacgctcaagcttttcgccacctgagcagtcaagaatttcgtaatctttccaattatctgcaatccacatgaattagttaatcctttctacaaaaaatacttgtaatcatacagagacaatctcaaaaaacgatacatttttgaaattgtttcgttttatatcgtctataacatttctattataatagaaagttctatggtaatgcaatgaaaattttgtgattgagaaattattgaaaaaatactggaaaaaatgcactaacaacccactaaaatggtaggaatataaaacaaagcgacgaaaacatataatacctattgacgtagtaggttgataggtgtatcatacgcctatcgaatctgagatgcgaaaaagtaacagcgttacatcaaatgatagatggagtgatgagtatgataaaagtagaacatgcaaacaaaacattttccgggaaatacggtacagtacatgcgctgcaggatgtcagcattcatgtagagaaaggtgacatctacggaattattggattttccggagcaggtaaatcaactttgatccggctggtaaatggattagagacaccggatacgggaaatgttatagtccagggagaaaatcttgggaatctgaaaaaaacgcagcttcgcaagcttagaagaaaaatcggaatggtttttcagcaatttaatcttcttgaatcaaaaacagtgtatcataacattgcattgccattgattcttgaaaaggcaccaaaggaagagattgataagaaagtaaaagaagtacttcggtttgtagaactggaagataagaaagatgtttatgtaagccagctttcgggaggacagaaacagagagtgggaatcgcaagggcactgacaacaacaccggacatcctgctctgtgacgaggcaacaagtgcactggatccacaaactacagaatccattctgaaactgcttaagaagatcaaccgggagatgggagttacaatccttctgatcacacatcagatgcaggtcgttcagatgatctgtaataaagtagcagttatggagaacggacaagtagtagaggccggaagtgtgcttgatgtattcggaaagccacagacacctgttacaagaagattcgttcagactgtagtaaatgatcagattccggaaagtattattagtcttgtgaaagaacagaaagaacatttccgggtagagaggcttaagtttatcggaagcagtgtaaaacgtccggtaatttcggatatctgtcatgtggatggaattgtagtaaatattttaggagcgactgtgcaagaattgcaggaaaatgtaatgtgtgtgttcattttgcagttgatcggagcagaagagaaaatactagaagctgagaaacagattgatgggaatggagtcatcagagaaagagtggaggcgatttaatggaacaagagtattttggagtatcactggaaaagttattgaccagtgggggacagaccttatatatggttgcatggtcactgattattggaacaatcataggaattattttggcattgatccttgtactttgccgtaaaggaggactggtagagaatctgatcctttacaatattgtaagtatctatattaatatagtaagaagtattccgtttgtgatcttactggtagcgatcatgccgttgacaagggcaattgttggaacgaccatcggaagtacagcatcacttgtcccgcttgttatttatatcagtccatatcttgcacgcttgatggaaaatagcttactggagattaatccgggtattctggaagcggctgaagcaatgggggcatctacctggcagacgattcggtattttctgcttccggagacacttggatccattgtacttgctttgacaacaggtacgatcgggctgcttggggcatcagcaatggccggatatgtaggtggaggcggtgtcggagatttggcattgacgtatggttatcagagaatgaatacgccattgatgatctttacagtggttgtattggttgtatttgtacagattcttcagctggcaggaaatataatttcaagaaaactcagacaacatagataattgattaagaaagaacgaggagaattatattatgaaaatcaagaaaattattgcaggattattagtagcgacaacagcattcagcctggcggcatgcggaaattcaggttcaggagatacgaagaaaagtgacgcggatacatcagagaaaaaggaaatcgtctatggaaaatcccagggaccatatacagaacttttcgaagatgcaattgttccaattcttgagaaagaaggatatacactgaaagctgttgacctttcagaccttcagacagcagatgttgcactgaatgacggagatgtagatgtcaatgtagaacagcatacagcatacatggataattttaataaaagttacaatgcagatctggttgcaatcagcccaatcccgacagttccggcaggagtttattcagataaatatgattctgtagatgagattccggatggtgcaaaggttgctgttccaaatgatgcgtccaacacagcacgctgctatctgatgcttcagaaaatcggctggatcaagcttgacgagaatgctgatccatccacagttacacaggatgatattgtagagaatccgcacaatatcgaatttacagaaatgaacagcatgacaattcctgcagcagaatctgattttgactatattgcaatcacaggaagtgtcgtatacaatgcagggattgacgcttctacagcactggctaacgaggatattcaggattatctcgtacttcaggtcgtagtaaaagaagagaataaagatgctgcctgggcgaaggcaatcgtggatgcatatcattcagacgagtttaaaaagtatatggaagaaaacaatgatggattatggtggatcccggatgaacttaaataatcaggaaaggcagtgattaaaagatggatcagacagaaaaattaatcctggaagcaatcgatcagcacagagatgagatcattgaatttgccagagatatatacgatcatggagaacttggatataaagaattcaatacagcagaaaaattcataaagaagatgaaagaattaggtctgcgcacagagacaggacttgcaattacaggaacaaaagcgtatttaaatgaagaaaagaaagatacagcaagccttgcacttcttggagagcttgatgcacttaggattccggagcatgcgcatgcgaatccagagacagatgcggcacattgctgtggacatcatgcacagatggcaggaatctttggcgcagcactggctcttacagttccggagattgcggaaaaactggatgggcaggttgtatttttcgcaacaccggcggaagagtatggtgagattggattcaagaatgagctgcgcgcacagggaaaaataaaatatggcggtggaaaatgtgagctgcttcgtatcggcgcatttgatgatattgatctttgcattacacatcacattgcaccgggaaatgacatcatagtaggaagtggaaccggaaatggatttgtatctaaagtgatccgttgtttaggtaaggcagcccatgcggcaggaacaccggaacaaggtgtaaatgctctgtcggcggcgtcacttggtctgcaggcactcggtctgaatcgagagacattccgtgatgaagattgtgtccgtgtccatccgatcattacaaaggggggcaacctggtaaatgtagtgcctgatgaagttgtagtagagacactggtaagagcaaaaacaattgaagcatttaccgatgcagcgaagaaaacagaccgatccttccaggcaggagctgttgcaatgggagcgaaggttgaaatcacaacacttccgggataccttccgacacttgcggaagaagcactcccagaattaaaaagagcagcagaactttctgcaccggaaacaaatgtgatcgaggcatcaggacatacgggaggatcaacagatgtcggtgatgtccagcacttaatgcctgtatatacatttaatacaggtggtgtaaagggtggactccatcaggtagaatttgaagtgacggatgaggaagaagcttatattgtcactgcgaagatgtttgcacttggagcctatggacttttgaaagaaaaagcagcaagaagcagagagcttgttaaaaattataagccggtatttgaaaattcagcaaagtatgcggagtttatggatcagtttgattcgaaagaagtactggaataatttgagtttccgtaagatgtaacttgaaaataaataacttctcctaaaataccaatctgccagacttgaatgaatctcgccctatcgccaaaggcgatggggcgagattcgttactgttcactgggcaactgggacataagaaaaacgatggtatagactaaaacagtcgaagccagagtcttttaaagcccaaactctttcaataacttcttttgatattccctgtcagcagctgccttgagaatatcatcagttctgtttagttcggataattttaaaatcagttgattaatcctgtttaccccaagagattccccttcttttatgccttcttctcttttttcatctaattcatctttcattaattctaataacgcattacacatatctcgttttccctcctttagctgattctcgtttgcttttactataatctccataacagcctgatacagctggttcttctctgaattcaatctgcaagtcggcataaaatgcaggatgccactgaagcattttcccatctgtcggttgttgtttttccggcaattgttttctcttttgtttcatctaagagacctccttatgtgatttttcacagaagttctctctccatcagaaaacctctgctttaaataatggattttaaaagcatgaattttctgatttggcaggtacgttctacctgtaatgaaacttttatatgaatttagatgttttagaaaatatgctttgaaataggataacatatttatgtacaatgttcaatgttttttggtaattgtcaactcctggatcgttactgttcgctctgttcacagtaacgtaaccaaaattcattccaaattgcctgtggcaatggaattataattctatacatttccctacttttatggtataatttaaaagttattttaatgatttatcgatttaatgtgatgaacagtcgacgtaataatatcataaaagaaaggaattgaagaagtatgttatctacgatagaatcagtaaatagtgctgtgaataactttatctggggcgttccggctatgatctgcattattggagtcgggctttacttaagtatccggaccggcttccttcagatcagaaaatttccgtatgcgatgaaagtgacgatcggaaggatgctccgcaaaagagatgcatctgacggtgcactgactccgttccaggcagtttgtaccgcattggcggcaactgtcggaaccggaaatatcgccggggttgccggtgcaatcgcaatcggagggccgggcgcagtgttctggatgtggatctcagcacttcttggaatgtgtacaaagttttccgaagttactcttgcagttcatttccatgagacgaatgcagaaggagatcgtgtcggtggaccgatgtattatatcaaaaatggtctgaaaaagcattggcactggctggcttatctgttcgctgcattcggagttctgactgtatttggaacgggaaatgcaacacaggtgaatacaatcacaacagcaatcgattctgcactttttaattatggaatcataggaaaagattccgttggaacattgaatcttatcatcggaattgtacttgctatcctgatcggcatgatccttcttggaggaattaagagaattggtcaggttacagaaaagcttgtcccatttatggcagcaatttatgtgattctggcacttggtgttgttgttttgaacttccagaacattccgagcgtatttggatccattttcgaaggcgcattttcgccggcatctgtgaccggaggcgccgtgggatctttctttatgagtatgaagaaaggtgtttccagaggaatcttctctaatgaggcaggacttggtacaggttctatcgcgcatgcatgtgcagatacgaaaaagcctgtaaagcagggatttttcggaatcttcgaagtatttgttgataccattgtaatctgtacattgacagcactcgttattctgtgcagcggtgttccggttggatatggagaggcggcaggagcagaacttactattcttggatttacatccacttatggaaactgggtatctatctttacagcggttgcaatgtgctgtttcgcattttctacgattatcggatggggactgtatggaacaagatgtgtggaatttcttttgggaacaaaagcgaataagccattcatggtactctatgcactcgttgcaattgtaggtgctacaatggaacttggattgatgtggaatattgccgagacatttaatggtctgatggcaatcccgaacctgattgcagtattcttattgtcaggtgtagttgtaaaacttgtgaaagaatattttgcaggagaaggaaaagaaagttaaaaataaaactagatatagaagatttaaagctctggtgttttttgaaatcaccggagtttttttaaatgaataaatatacgcgattatttataagaatagcatatggtttttcgcatattggcaaatagcataaaatctatgttggataaaaaagaaaatgacataaaactacacaaaaagtgcaaggaaaaataaggtagaaatatacaaaaaaacggaaaagtgaaaaacgttatattttatgtcctatattgtccaagattttattcagtggctatggtataattttagaacgactaaatgtgaaaaaaatatgtttaaaatgtgaagaaaaaatgtatattctgtgaaacgcataaataaacagtggcagcaatgcaaacaacagaggttacaggagctgttgaaatataaaagaagcggaaggaggtttatgcaggcagtaatgtctgtgaagttgtgatttgcaaacgaatgtgaacacaacgcagggacagaaagaaaactgttcacttaaaaaactaggaggcaaaagcatgagaagaaggttaaaaaaacttatcggaattacaacagctgcagcaatggctgtttcgttagttccgacaaccgtttttgcagaggaaccggtggcggctatcgcagaagaaactgcaaagaatgataatcttttgagagtctggtatgatgaaccggcaacagattggcagacacagtcactggcaatcggaaatggctatatgggaagtcttgtattcggcggcattaataaagacaagatccatattaatgaaaaaactgtctgggaaggtggaccgacaagttataatggctatagttatggtacaacaaacagaacagagacagatgcagatcttcagaagatcaaagatgatctgaatgcgatccgtgagaaactggatgataaatcagagtatgtctttggatttaatgaagattcctatgaggcaagtggaaccaatacaaaaggtgaggcaatggattggttgaacaagcttatgggagatttggtaggatatagcgcaccgaaggattacgcaaacctgtatatctccaataatcaggattcttcaaaagtgtccaattatgtcagagatctggatatgcgtacagccttggcaactgtaaactatgattatgaaggggttcattatacaagagaatactttgacagttacccagataatgtaatggcagtacgtctgagcgcagaccagaaaggaaagatcagctttgatacaaatcttcagagtctgatcggaggaagaactcataagagtacagttgacggtgatacaatcacaatgcgtgatgcattaggcggaaacggattgaaaattgaagcacagttgaaagttatcaatgagggaggaagcctttcttcaaatgccaatggttcaaatccatccatcactgtatctggcgcagatacagttacattgatctttgcatgtggtacagactacaagatggagcttccgagttttcgtggagaggatccacatgacgcggttacagcaagaatcaatgcagcagctaaaaaaggatacgaagcactgaaaaaagaccatgtagcagatcatgatgcattgttctcccgtatggaattaggattcaacgaagaagttccgacaattcctacagatgaactgatcaagaagtaccgcaacatggtagataacaatggcggtgaaattcctacagaatccgagcagagagctctggaagtaatctgttaccagtttggacgttatctgacaatcgccggatcaagagaaggagctcttccgacaaaccttcagggtgtttggggagaaggatacttccagtggggtggagattaccacttcaatatcaacgttcagatgaactactggccaaccctggcaagtaaccttgcagaatgtcagacagcatataatgattatctgaatgttctgaaagaagcaggacgttatgcagctgcagcagcttttggtattaagagtgatgagggagaagaaaacggatggctcgtaggatgttttagtacaccatatatgttctcagcacttggacagaaaaacaacgcagccggatggaatccgatcggttctgcatgggcacttctgaatgcatatgagtattatctgtatacagaagatacagattacctgaaaaacgaattgtatccatctctgaaagaagttgcaaacttctggaatgaggctctttactggagtgagtatcagcagcgttacgtatcagctccttcttattcaccggagaacggaccaatcgtaaatggtgcatcttacgatcagcagtttatctggcagcacttcgagaatacaatccaggcagcagagacattaggtgttgatgcagatttggttgcacagtggaaagaaaaacagtccaaacttgatcctgtattagttggtgacgacggacaggtaaaagagtggtatgaagaaacacatttcggaaaagcacaggcaggagaccttggtgagattgatatcccacagtggagacagagccttggcgcacagagtggaggagtacagccaccgcaccgtcatctgtcacatctgatggcattatatccatgtaatatgatcagcaaagacaatccggaattcatggatgcagcaatcgtatccctgaatgaaagaggactggatgcaacaggttggtcaaaagcacacaaactgaacctttgggcacgtacaggacactctaaggaggcattccagatcgtacagtctgcagttggtggtggaaattctggattcctgacaaatcttctttcatcacacggtggaggagaaaactacaaaggatacccaatcttccagattgatggtaacttcggttatacagcaggtgtaaatgagatgcttcttcagagccagcttggttatgtacagttcctgccgacaatcccagagcagtggaacacaggacatgtagaaggtatcgttgcaagaggcaactttgagatcggcatgaactggtcagaaggtaaagcagaccgtttcaagatcaaatcaagaaatggaaatacatttacaggcgaatacgagaatattgcagcttacacagtaaagaaatctgacggaacaaaggtagagacaacagttctctcagacaacaagatttccttcccaacagaggcgggagaaacttacacaatcgacttcaactcaactcctgagaaacttcagggcgtaatcaatcaggcgaaagatcttctggataaaatgggaggtaaagttcttgatgtacagaaagcacatcttgtggaactaatccaggcagcagagaaggttgtagaagaagagaaatcagatgagtattatgataatacacagatccttctcaaagcaatcaaggttggagaagcagcaatcgaattaagagattcctgcagtgaagcagaagaagtatatgaaggaagagatgtaaacgaagattgggcaagctatgttaatacagcagcagatctggacaaccagttagatgcagcaatagaacttctgcaagacaaagaatgcacagttaccgagctgaatctgatgaagaagagtgttgatgaggcgaaagatgcactccttggaatttgggataaattgacattaacaattaaaccaacggataaggaaatgctcggagcaaacgacaagattgaaatttccggcgagtttaacgatcttcagatcaaatatacaattgatggaaatgagccgacatggttctcagaggaatataaagagccatttggaataacaagatctaaagaaacagtaaaagctgcattgttccttggaagacgtcagatgagtaaggtatttacagcggaatatatcagcaaagaagcattaaatgtagaagacagcattgaaaaaacttataaatctgttacagacaacggaacatccggtgacagtgaaggtttagcaggtgctcttgatggaaagaacaatggtacagcatggcagttgaagcagatcccagcagagcttgaacttcatttcgcagagcctgtagaagtaaatgcggcagaagtggcattagacaattactatccggattatattgatatcaaagatatggatatcgaatactgggatggaaacgaatgggttgcagcagtcaaaggagcatctatcggtggacagtccagagtattcttatttgatagttttaagtctgataaggttaaacttagaattaataaagcatggctctatgattattatcatagctctggttggtatacaagcattgatgcattccgtctgttcaatctgaatgatgtaataacaacagacaagagttcattagatatggtaatctccgtagcacagaaaaatatagatgacggagaagtagatgcagctatcgagagcgtaagagaaagctttacagcagtatttaactatgcgaaagatgtaagtgctaatgttcagtcaagccaggcagtaatcgacaatacaacaatcgcattgatcgaagaaatccagaagcttggatttaaggctggagataagacacagcttcagagtcattacaatttatacagtgcattaaatctggatctgtacattgatggagtagagaaagatgcatttgtggaagcacttgagaatgcgaaagcagtgattgaagatggtgatgcaatggaggcagatgttgtagcagcagaccagaaacttcttgatgcagcagaagtacttgttaagaagggggacaagacatctcttcagaaactggtagactctacagctgattacaagaaagagaactatctcagcgcaggatggaacacattcgaagtagcacttgacgctgcaaagaaagtacttgcagatgtgtccgcaacacaggaagacgtagacaaggcaaaagaagttcttacatcagcaatgacagcacttcgttacaaagcagacaagtccgtactggaagagatcattggaaaagcaaaagcaatggatctgaccggatacagcgcagaaaatgttgcactgttcaatgcggctcttgctaaagcagaagcagttatggcaaacgaggaactttctgtttacgaacagccaatcgttgacgcagcagttcttgatctgcagaacgcaatgaaagctttgaatgatgagaaagataatgcatcaaaaccatccgacccatcaaaaccgtcgaacccatcaaaaccgggaagtggaaacggagacggtgctacaggatctgacaagaataatggatcaggttctgatggcaaacatcaggcgacaacagcaggtaagcagaatggcggaaacacagtgagcggaacaaacggaaaagcaactaagacaggtgatgttacaccgatcattccggcggcagcaggtgttattctttcaatggcagcaattgttgttgtactgaaaaaaagaaaaagataataaaaaagaatcaagaagtggaacagaaatcaagaatggtgaaattcagaaaacagtaacacggaaagattcgtgagagatgagaggacttttttgacgaagtcctctctttttgagtgattaagagattctatatccccctacctggcttgtggatttattctatttcttatacaataaattgcattgaaagaaaatagacagcgtgaggagaaaacgatgaaacgaagaaaattatcacgagtgcttgcaacaacattagctgtatgcatgttggcaggtggtgtacttacaggctgtggaagcaaatcagacaatgtaaataataagactacacaaagcgggtctacattaatctatggaagtaatgattacacaaggattaacccggctattgatgagcatggagagattaatctgcttctgtttgacggtctgacagcacatgatgagaataatgaggtagtaccgggactggcagaatcctgggagttggatgacgcgacaaatacttatacattccatcttagggatgatgtaaattggcaagatggagagaaatttacagcagatgatgttgagtttacgatcaaagcaatcatggatccggacaatgaatcagagattgcttctaattacgaggatgttacagcaatcaatgtgatcgatgataagacgatttcttttacacttcgggataagaatgtggcatttcttgactatatgacaattggtatccttccgaaacacttactggaaggcaaggatatgcagacagatgaatatttccataatccaatcggaacgggtccgtataagattcaggagtgggatgaaggacagagtattacacttgtaaagaatgaggattattataaaggagctccgaagattgatacaatcgtgtttaagattgtaccggatgataatgcaaaggcactccagttaaaatccggtgagatcaatctggcaaaggtgacaccgaaggatgcacagaatttcacagatgatgatacttttacagtatatgatatgaagacagcagattacagaggtatcctttataactttaataatgagttctggcagaggaacaaagatgcaattccggcaatcagctatgcaatcgatcgtcagaagatggtagacagtgttcttctgggagaaggaattgtagcttatggtccgcttcagagaaataaatataataatgaagatgtagagaaatactcttatgatccggcaaaagcaaaagaagtgttagaagtggctggatggacgttgggagatgacggaatctatgagagaaacggagagaagctttcttttacaatcaatgtgatggaaggtgatcaggtgcgcgcagatcttgcggctatcgcatgtcagcagctgaaagaagttggagttgatgcaaaagcacaggttcagtcagaaatcgactgggcaaatcaggaagcatttttgatcggatggggaagcccgtttgatgctgatgaccatacatataaagtgtttggtacagataaaggaagtaattacagtggatattccaatgaacaggtagacacttatctgacacaggcaagacagacaagtgatgagaatgagcgtaaagaagcatatgcaaagtttcaggttgcacttgcagaagatccggcatatacattcttctgttattgcgatgtagattatgtgacgaataagaagatccagggaattacaaaggatacagttcttggccatcatggtgttggaattttctggaatgtagaggattggacaatcgaatgaaaataaaagaaatactggcagtgaagcatttgtcagttgaatttcaaacttcagatggaaagaaacaagtagtaaaggacgtctccttgtcgttaagacaaggggaggtccttgctcttgttggagagtcaggatgtggaaagactgtactgtgccgatcaattttgaaattactgcccaagagtgcgtctgtgacaggcgaagccattcaatataaagatcagaacctgatcggatataatgaaaaagagatgcagcagatccgaggacatggaattgcgatggtctttcaggatccacagagtacattaaacccgacgatgacagttggaagtcagatcgaagaggcgattttgctgcacgaaaaagctttgaagcagaataaaaagaaatcagcaaaagagcgggcaatcgaactgatgaagctcgttgggatcaaagacgcagagcagcgttatgatctatatccgtatcatttttcaggtggaatgcgtcagagatgtgtgcttgcaatagcacttgcctcaaatccaaagcttttaattgcggatgaaccgacgacagctttggatgtgacaattcaggcagagattctgaaactgttgaaaaaattacagaaagaattgaatttaagcattctgtttatcacacatgatctcggagttgttgctcagatcgcagaccgggttgctgtaatgcaggatggaaatatcgtggaattggaagaagcaaaacagcttttcacagctccaaaacattcttatacaaagaaattgcttcatgatcatccttattatatgcatagaaatgaatcaaaattaataagtgaatcagaattgcatgaaaaactggtagaaatctcacatttgtcctacttctatcctttagatagaaaaagggtgtttcaagcggtgaaagatgtgtcctttgagataagaagagacgagatttttggactggtaggtgagtcaggatctggaaagtcaacggttggaaaatgtctgatgggaattctaagtctggaagcagaaacattttcttatgatgggataaatcttcttgataaaaaagcaaaaaagaaaaatgcgagaagactgcaaaaagagcggcagatgatctttcaggattcaacatcttccttaaaccagaaaatgaaggtagagaagatccttgcagagccattggaaatacataaagtattttctgacaagaaagaacagcatgattttttatgtgaaatgatggaagaagtggaattgcaggaagaacagcttcatgtgtggccaccggagttgtcaggcggacaaagacagagagttgcaatcgcaagagcatttgcaatgaagccgaagctcttgatcgcagatgaaccaatcgcttcgctggacgtaactacacaggcacagatggtgaagctgtttcggcatttacaaagagaacatgactgtgcaatcctttttattgcgcatgatctttcaatggtgcgtctattatgcgaccgtgtcggagtgatgaaggatggaaaacttgtggagataggagaaaccgagcaggtgtttgaacatccgcagcatttatatacgaagaaacttctggaggcgattccgattccggagatttcaggagaggagcagagtgatgaagaaacaatggcttagaaaaatcggactgatcttgctatctgtttttgtgctctcacttcttgtgtttgtaatgtcgcggctggcacccggggatccgctggtttcttattatggagaacgtgcggagagaatgtcggtggaagaacatgagcatgcaatggaacgacttggattaaacgaacctatccctgttcagtatgtgaaatggcttggaaatgcttttcagggggattttggaatctcttataaatataaacaagatgttcttacagtgatcgagggacgtttagttaatacattattgcttggcggaattggttttatcctgacatttggactggcacttttgcttggaattttctgtgtgtattatgaaaatcagcttccagaccggattttgcgtaaggtgggaacaatcacaagctgtattccggaattctggttgtcacttatattgattttgatttttagtgtgaatctaaagctccttccgggaagtggggcatatgatcttggccaatcggcaaatccgttgagcagattgacgcatctgattcttccgctgacagttgttgtgctgagccacctttggtattatgcgtatctgatccgtaaccgattgttggaagaaactagaaaagactatgttttactggcaaaggcaaaaggaatgtcacgaaaaagagtattgttctttcactgtgtgaaaaatattatcccatcgttcatcagtctgatggcaatttcacttcagcatgtgatcgaagggacgtatatcgtggaaatggtattttcctatccgggaatcggaacgctttcttttgaaagtgcaaaatatcatgactataatatgctgatggtgctttgcgtgtttaccggtatttttgttcttgcaggaaatgtgataggacagtctgtcagtgaatggatcaatccaagaatgaaagagataaaaatgacaggaaaggcagatagggtatgaggtggagaaaatgaaaaaagcgaaaaaaaataatgccgttatcattgccggaagtattcttgcagtcatcgtatttgcctgtgttttctgtcgtttctttatgacgaaagaccctacatacatggatctgaagaactgcaacatttcaccgaataaagagttcttttttggaacggatacgatgggaagagatattttttcaatgattttatacggtggtagaatctcgttgtttatcgggttgatatccaccgtgttatcgactacgatcgcggtgatctacggatccttcagtggaatcgtaccggagtggatggatgaactgatgatgcgttttacagaaattttattgagtattccttcaattctgttaattatctttcttcaggcactgacaggaaagaactcagttgttgcaattaccgtagtgattgggtttaccagttggatgaatatcgcaaagatggtacgcactgaggtacgacagctccgtgagagtgaatatctgattgctgcaaaatgtatgggtggaagtttctggcatattttacgtgtgcatttgctgccgaattttgtttcatcgattatgtttatggtcgtgatgaacatcagaagtgcaatcatagcagagtcaacattgagctttcttgggattggtcttccgatggaaatcatttcctgggggagtatgctctcgctttctgaaaaggcattgatgacaaactcctggtggatcattctgattccgggaatcgtgcttgtaatcacattactgtgtattacggaactgggagaagctttgcgtaaaaatgtgaatcagaaagaaggcaatttatagaaaatttctatagaaaagtttgataacctatagtaaaaatgttatactgagaaacagaagcctggaggttaaaatacctgaacgaataggtaaaggagagcgatagaatggtaacagtaaatgctatgggagataaatgcccggttccggtaattaagacaaagaaagcattagatgctttgacagctccggagacgatagaagttctcgttgataatgagacagcagtggctaatgtgacaaagatggcacagagtacaggcgcaacagtaacacaggagaagcttggagaggatgaatataaagtgacaatccaggcgcttgcaggagaaggaactcagacagtaccggcgggtgcggtttgcgattgtgttccgacaggggatacggtagttgtgatttcttctgacaagatgggaagtggaaatgatgagctcggaaaagtgctgatcaaaggttgcatctttgcaatcacacagcttgatgagcttccaaagaagatgatcttctacaacggtggcgctaagatcacatgtgaaggatctgactctctggaggatctgaagaatctggaaagccagggcgttgagattgtgacttgcggaacatgtctggattattatggaatgaaagacaagcttgcagtaggaacagttacaaatatgtatgacattgtcgagtctatgaataatgcaggtaagattgtgaaaccttgttagaaacataggaacagttacagtaatttgaaaatgtgatggaaaagctgctgcaacagctttttcgtataccgagggaattattttgaaaaagtattcgaaaggaagtgggcgaaatgagtaagggactcaaagagattcatctgacacagatgacaaagacagctggttgagcggccaaaatcggtcctgagacccttgcccaggttctgggtaagctgcctaaattttccgatgagcgtctgcttgtcggtgttgagacatcagatgatgccgcaatttataaaatatcggatgagactgccatgatacagacactggatttcttcacaccggttgtggacgatccgtatctgttcggacagattgcagcggcgaactccttaagcgatgtatatgcaatgggaggagagccgaaggttgcattgaatattgtatgttttccaaattgtctggatccggagatcttaggggagatcttgcgaggcggagcagacaaggtgttagaagcaggagccgttctggtcggaggtcattcggtgcaggatgatgaaccgaaatacggactctcggtaacaggcttcgttcacccggataagatttataagaattacgggtgtcagccgggagatgtgctggttctgaccaaacagcttggaagtggtattgtgaatacaacagtgaaagcacagatggcttccgaagcagccgcggaggaagctgcgaaagtaatggcttcattgaatcagagagcgaaaagagcaattgagaaacacacgatccacgcatgtacagatgtgacgggatttggattgctgggacattgtacagagatggctgaggcaagtgacatgactctggaattatatccggagcagattgaatatatgacagaagcgattgcatatgcaaggatgggactcgttccggcaggagcatataagaaccgggagtttgcagcagaaggactggatgcaggagatatagaagaggtctatttagatctgatcagcgatccgcagacttcaggaggacttcttgtcagtgtcccaagagaagaattagattgtctgttagcagactttgaggcagtgggaatagaaacgaaagtttcagttgtaggctgcgtcaaagagcggcaggaaaaactcatccaactaaaaaaaggaaaaatggaaatgctgtaagagatttcttgttactgttcacagtgctctgtgagcagtaacggtttcttgcggcatttcgctgtagaaagagaaaataaggagcagcagtagttggaacagtcagatcagaataagaaaagagaaaatttacagaaagaaaagaatcagatcttccgcctgcttccgcgagtagatgacttgatgaagaaagaaaatgttcagagactggcagagaaagaaggatatgagcgtgttctcggagcagtcagagattctgtagagaatctgagaaatgaaatctcacaaggaatcaaaaagggaatcagtgagcatgaagcgaaagaaatgattcagaaatttctgtatgagatagaatcaagttcaaagaaatcagaagtgaaccatcttctggaacaagaacagaaaaaggagatccaaccagtttataacggaacaggagtaatccttcataccgggcttggacgtgcaacgcttagtcatgagattgcggaaaaactgaaagcagttgcagagaattattccagtctggaatatgatttacagactggaaaacgtggaaacaggaccggatatgcagaagaattgctttgtcagatcacgggagcagaagcggcaattgttgtgaataacaatgccggagctgtacttcttgccctgagtgcattgacaaaaggaggagaagtgatcgtctccagaggagaacttgttgaaatcggagggaaattccgcattccggaagttcttgaattaagcggtgctattttgaaagaagtcgggacaaccaatcgtacaaggatagaagattataaagcagcagtcagtgaaaagacgaaagcatttttgaaagtccacacaagtaattacagaattgtcgggtttacagaatcggtaagtgcagaagaattgtatgaattaagtactggtctgatagagtgcacgcaggaattgccacctgaaaacttcgagaatcatacggaacgaagtggaattccagtgattgaagatctgggcagtggtgtacttataaatctggaggaatatggtttatccaaagaaccaaccgtacaggaagaagtaaaggccggtgcagatgttgtttgttttagtggtgataaactatttggtggagcacaggccggagtccttgtaggaaagaaaaaatatattgatcagatgcgtaatcatccattgcttcgggctcttcgggcagataaatttacaatgacagcgatagaagaagtgttgaaatgttatctggatcagaaagaagcggttcaaaagattccaacattgagaatgctgacaagacctgtggaggaaataaaagagaaagcaagagtctgtgctgatagatggaatcaagagggagcgtccgttcagattcgagtggaaaaatgtatttctaaggctggtggcggtgcacttcctgagacggagattccaagttatggagtagcattggaatcaacagagatcaccgttgaagaattagaaagcaggatgagaaatctttcagttccggtaattggaagaataaaggaagggcgtttccttctggatatgagaacgttctcggaagaaggaatcgaatatctggcgacacagatcagacatgttatggaaagaaagcataactaagaaagaaaaacagcattaagaaagggactgcattagatggaaagacatgtgatcatcggaactgccggacatatcgatcatggtaagacgacactgatcaaggcattaacgggaagagatacagaccgtctgaaagaagagaaagcacgtggaatcacaattgatctagggtttacatggatggatttgacagacggagagcgtgtcggaatcattgatgttcccgggcatgaaaagttcatttctaatatgactgcgggtgtggtgggaatggaccttgttcttcttgtaattgctgcagatgagggagttatgccacagacaagagaacatcttgcgattttacgccttctcggtgttgagaatatccttgttgttttgaataaatgtgaccttgtggatgaggaatggctggagatggtagaacagcagatctgtgaagaaatgcaacagttgcttacagtaggtcagagaaatgatcaggtagaagataagctggaatataatgtggacattgtacgtgtttcagcaaaatcaggagccggaatagaagaattaagaagtcaaatcctgaaatgtgtaaaaaagcagaaagaaatgtggaaaattcctgcatttccaagacttcctgtggacagagtattttcaattaaaggaagcggaacagttgtgacgggaacacttcttgatgggaaaattcattcgggagatcgggtgatgatctatccacaacaaacttcgtgcagagttcgtggagttcaggtgcatgagcaggaggcagaagcttgtgaagcaggtcagcgaagcgcactgaacctggttcagacggaccgaagacagagcagtgatgggaagtttgtgtatcgaggaaatgtgatcgcaccggaaggaagcatgaaagtcagccgctatgtgaatgcaaaactgacacttcttccacaaagtaaaagaagtattgaacatcagactcgattacatttttatagcggaacaacagaagttctgtgcagagcagttccgttgtcctgtgagaaagttgagccgggggaatcagcctatgtccaattaaggttagaagaacctgctgcgttttgtccaggggacaggtttattgtccgattttattcaccactcgagacaatcggtggaggaattatccttgaaatgggagaaaaaaaagagcgaaaatatcatgatggggttttacaaagactggaactgttggaaaacaatctttggaatcaagaaaataagtgttcaaaggaaatcccggatcaagaaaagagcctgcaggaacagatttctttagaaaagagaattatggatgaattggaaagctggttgtctgctcatccatatcgaagaggaatgccaaagacagttcttctcaatcagatcagcaaagggaaaaaggaacagaatcgggaaattcagaaatgtcttatactattggaggaacatggaaatgtcggttgtataaggttgcaacaggaaaattctagtatagagctgatttctccggagggatataaagtaaaagagacggaagaagtttctaaattaagagaaatctttgccagtcaatcagatgagaataaagttttctttttgaacaaagtggaattggaaacattttttgagtcagcaagaaaaacgaaaaagaaaagtggaatacaaagtcaagatgaattgatggaaattctgaattatatgcaggaagaaaacgaaattacagaggtttgtgagagtgtttatacaacaacagagattacgtttaaaattagaacagaagtaagccgtatgttatccgtatctaaagtgattacactgagtcaggtgaaagaagtatttcagacaagcagaaaaaatgccagattgatttttgaatatacagatcgaatcagatttacagcaaaagaaggtgcacagacagaacgctccgcaggaagtaaattgcaaagagaacaaatcagaggaaagtaaggggagagtgaatgaacttaaaacaactggaagcatttgtgaaagtagcagaaacaaaaagtttttcggaagcggcaaagcagttattccttacgcagccaactatcagtgcacatgtgtctgcattagaaaaagaactgaatacctgtttcctcataagaaatacaagaggagttgagctgtcagagagtggaaaagagctttatgcttatgcggtacaaatgcttgaaatcgaaaagacaataaaaggacggtttggaaaagaaataaaaccggagggaaatgtacttcgtattggtgcttcaaccgtaccggcgcaatatattcttccaaatgtaatgtctatattccatgcagaatatcctagtgaaaaattgaagctttttgagacagacagtaaaggagttatcgatatgattctttcccatcatattgatattggatttacaggaaccgtgattgagaaaggaaactgtaaatatcttccattttatgaagacgaattagttgtgcttactccggcaaatgagaaatttgttgaaaagctttgtggtggacaaatattggcggattggatcatggacgagccggtgatcttaagagaagaaggatccggaacaaagaaagaagcagaaaaaatgctggcagaacaagggattgatataaaaaaaatgaagctggcagcattgatggagaatcaggagacgatcaaaagatctgtaagtaaagggatgggagttacgattttgtctaaacttgcggcagaagaggaattgaaaaatggaacacttctggcttttccactgggcagtcaaggtggaaagagaatgatcaaccttgtctatgatgcagaatatccgttgcttccggcagcagagcgttttataaagatgataaagagaatgtatttgaagaaagaaaatacagggataggtgaatgcaaataacacgccatatttatagaaaaagcctataaatagggcagatccattacggattcctattagacggaaacagaaaagagaagtatactataactagtgatttgtatctaaaaagtaaacgatataaacacatacagaaaggaagagaagccctatgatctacatggataatgcggcaactacattgcagaaaccggaagaagtaaaagaggcgattctctatgctctcgagcatatgggaaatgcagggagaggcggaacagaagctgcactggatgcttcgagaagtatctatgcagtaagggaaaagcttgcagatttttttcatgcagaaagtccgacaagaattgcatttactgcaaattctacagagagtcttaatattgcattaaaaggtttatttcaaccgggcgatcatgtgatcacaacagtgctggaacataattcagtattgcgtccgctgtattggtgtcaggaacagggggtagagcttacaattctaaactgtgacgaaaagggaaatttgtcatatgaagagatggagaatgcggtgcgggaaaacacaaaagcaattgtgtgtacgcatgcttcgaatctgacaggaaatatgatcaatttgaaacgggtaggacagattgcatcgaagaagcatattttgtttgttgtggatgcttctcagacagcaggtgtttatccaattgatgtgcaggaacttggggttgatgtattgtgcttcacaggacataaaggtctgcttggaccgcagggaaccggagggctttatgttagggaaggcgtggaaattcgtccgcttctgtgtggaggaagtggcgtggatacttataacatgcatcatccgtcccagatgccgacggcacttgaggccggaactcttaatgggcatgggattgcaggacttggcgcagcgattgattatctgaaccgtacaggaattgatgtgatccgtgagaaagaacttcatctgatgcgcaggttttatgatgggatttctcagatcccggatgtgaaagtctatggagattttacagcagaggaaagagctccgatcgtgactttcaatctgggagattatgactcttctgaagtcagtgatgaattgaatgaagtttatgggattgcgaccagaccgggagcacattgtgcaccactgatgcacaaagcactcggtacagtagaacagggagctgtccgattcagtttttctcattacaatacagaagaagaggtcgattttgcaattcgtgcaataaaagagttgtagagaaagagaggaaaaggaaatgaatttgtttgattcaaagaagaaactgggaatcgccggtgtcgtaatgggtctggtagcagcaacacttgcttattttggtaacccagcgaacatggcaatctgtattgcgtgttttgtacgtgatacagcaggagcacttggacttcattctgcagagccggtacagtatgcaagaccggagatcatcggaatcgtcctcggtgcatttattatttcaattgcgacaaaagaatatcgtgcaacagcaggatcttccacaatcgtacgttttgtactcggaatgattcttgtgatcggagcacttgtattccttggatgtccgcttcgtatggtgatacgtatgtcagccggagatctgaatgcatgggtggcactgatcggatttgctcttggtgttgctacaggcgtgtttgcactgaagaaaggtttcagccttgggcgtgcacatgtgacaaataaagtgagcggaagtgtacttccacttcttatgattggagtacttgtacttgcacttggaacaaatcttttaaagagtagtacagcaggtccgggaagtatgcatgcaccaatcattatttctctgatcggtggacttctctttggagcatttgctcagaaatcaagaatgtgtttcgcaggaagtatccgtgatatcattcttatgaagaactttgacctgatcacaatcgttgtaggattcttcgcagttatgcttgtatataatgttgcaacaggacattttgttcttgcattcaatacacctggagtgatcgctcactcccagcacctgtggagtattcttggaatgtatgcagtaggatttgcagcagttctcgcaggaggatgcccgctgcgtcagcttgtacttgcaggtcagggttcatctgatgcaggtgtaacagtgatcggtatgttcgcaggtggagcacttgcacacaacctcggtctggcagcaagtggaacagcactgaatgctgagacaggtgagatcgtagccggagctgttccgccagcaggtaagatcgcagcaattatttgtattattgtatgttttgtaatcgcatttacaaacaagagaagcgaagcaaaataaggagaaaatagttatgagagaagtagatgcaagaggattatcttgtccagaaccattgatgctgacagcagaagcgattaaaagtgacaataatccggtaaaggttcttgtgacagaaccacatcagaaaacaaatgtggagaaatttgcaaaggatcacggaaagaaaacaacagtagaagaaatcgaagatggatttgctgttgtgatcgagtaaaatgaaatagtaaaaagccctgctccctttactgaatgtgaatttggtaaagggagcattttagtaataaaaaatgttttctatttgtctggtttcggttataataagagagttgagaaaaggaaagtgtgaggataacagcatgtatatttcaacaaaatatctgcatgtatttcttgatatcggagatgcgctgctttcaagcggggcggagatatttcgtgtagaagatacattgaaccgtatgggatatgcatgcggtgcaacacagatgaatgtgttcgtgatcacatcgagtattgttattacaatggaatttccagaagaaaatgtacgaactcagacaaggagaatccgaaagaccggaggaaatgattttgagaagctggagaaattgaatcatttgagtagacagttttgccagaatcctatgtctcctgaagaactcaggaaagtcttcaatcagattgacaaagttgttccgacacagacaggaaaactcgcagggagtattctggcagcttttagttttgcgcttttctatggaggaaatctttgggatgcattactggccggattagcaggcatcttaatctggggagcacagagacatataagaaagtattgcatgaatgaagtgacgtttcaatttgtggcatcattttttacgggatgttttatttgtgttatggcgagaatttttccggctctgcacgtggataagattatgattggtgatattatgttattgatcccgggattgatggcaacaaatgcaattcgtgatatattgattggagatacgatatctggggttatgcgttttatagaggcaatgcttcttgcagcagtgcttgcacttggatttatcggagcaatatttctgattgggaggattggttgatgacgtatattgttcaattatttacaggcgcagcgggttcggttgcatttggcatattgtttcatatgaagaagaaacaccttccattggcggcgcttggcggttttctgggctggctgctatttatcatctgcagagaatgctggggtggtgtgttttttccaacactggcagcagcttttggaatcgacttatatgcggagatacttgcacgtagttgcaggagtacttcgacgtcattttttgtaacatcagtaattccgctgattcccggaagcacactttattattgcatgagaagcgttgttgagggggatttacatcaggcgtggaattatggaagagatacatttttatatgcactagggattgcggcaggtatgagtattgcctgggcaatctgtgattttttaagaaagataagaggaaaacaggagatctcataaatgcgaaagaaagaattaaaacttgtggtgacatttcacacaactgcggatgcgatggcaatggaaaaagcatgtaaggcagaggaggtaccgggcaggctgattccggtgccaagagtaatctcggccggttgtggacttgcctgggcggcaccgcttgaggcgatagaacagatcaagcatgtaatgcaggaaaaggggattgagagagaagaacttcatgagtgcatggtctgatctttggattcaaggcaaaatgtgcatattctgtgttgaacagtggagtgatagatatggaagtgaacagtaacatgttttcaaaaaagaaacgagaatatgagaatgaacgttgattctgagggcggtttgcgctatactctattcagtaataaaagaaaaaaggttactgttcacacgagagtgtacagtaacgaaaaaagtgctactcacagatcagtgggagcggtaatgaaaagactgctgatagttcggcagagaaggagcataatatgagaattacagatgacattttatatgtaggtgtaaatgatcacaacattgatttattcgagggtcactatattgtgccgaatggcatggcttacaattcctatgtgatcaatgatgagaaaattgcggttatggatacagtggatgcagcttttggcgatgagtggctgaagaatattgcagatgtattgaatggagcaacacctgattacctgatcgttcagcacatggagccggatcattcagcaaatattcagaaatttctggaagtatatccgaatacaaaggtggttggaaatgcaaagacatttacaatgatcggaaactttttccgtgacctgaaacttgcagacgagaacaagctggaagtgaagaataaagatacactgacacttggaaaacatgagcttacatttgtatttgcaccgatggtacattggccggaggtaatggtaacatacgatagcaaggataaggttcttttctctgcggatggattcggtaagttcggagcgcttgatgtagaggaagactgggattgcgaagcacgccgttactatatcggaattgttggaaaatacggagcacaggttcagaatcttttgaaggttgcagcaacactggatattcagataatctgcccactgcatggaccggttcttacagagaatctggagcattacattggacagtataatacatggtcttcttacggaacagagtctgaaggcgttatgatcgcttatacatctgtttatggaaatacaaagaaggcagtggaacttcttgctgagaaactgaaagaaaaagggtgtccgaaagttgttgttacagatcttgcccgtgaagatatggctgaggcagtggaagaggcattccgttatggaaagattgttcttgctacaacaacttataatggagacatcttcccattcatgaagacttttatcgaacacctgacagagcgtaactatcagaacaagacaattggtctgatcgagaacggatcctgggcttctatggccggtaaagtgatgacaggaatgtttgagaagagcaaaaacatcacatggcttgagacttcagtaaagatcatgtcttctatggatgatcagaacaaagcagacattgagaagatggcagaggaattgctgtaagtaattgtgatttacaggaaagaaagattctgttaggatagaatcaggtagcggagcggatgaccagatatcagctggcgtttgctccgtttcttgataaatatatcaacaacagaatgtcaaagcattatggaggcagaagagtaactggtgtgcttcctggtcttcaaaaccagtgtggggcgtggtacgtcccgggtgggttcgattcccacatgtctccgccaaaagaaaggaaaaagaatatgggtatgaatcagacgccggtgtccgaacgagtgcacatcggcttttttggtaagcggaatgctggaaaatcaagcgtgatgaatgcggtaacaggacaggatcttgcgatagtttctgatgtgaaaggaacaacaacggacccggtttataagacaatggaacttcttccgttgggtcctgttgtgatgatggatactcctggaattgatgatgaaggtgaactgggtgaacttcgtgcgaagaagagctatcaggtgttgaataagacagacattgctgttgttgtgattgatggaacgtgtggtgtcagtgaagaagatctcaagataacagagcagattcagaaaaagaacataccttatataatagtactgaataaatgtgaacagtttacacaagaagatgagagattgcgggtacaggaaaataccgcaagttatttaaaaacagagaaagagaagattcttcttgtaagtgcagcggataaaagcggaatttatgagctgaaggaagaacttggagcgttgaaaggaaaggaggaggaagaacgaaagattgttggagatcttcttgaaccatccgattttgtagtgcttgttgtgccaattgacagtgcggcaccaaagggacgtctgattttaccacagcagcagacgattcgagatattctcgatgcggatgcatctgcaatcgttgtgaaagaaacggaacttacaaaaacattagcttcacttggaaaaaagccaaagatggttattacagatagccaggtttttggaaaagttgcgaaagatacaccaaaagatattttactgacatccttttctattttatttgcaagatataaagggaatctggaaacgatggtgcgtggggtaaaagcacttgatagtttaagagacggcgataaagtcctgatcagtgaggggtgcacgcatcatagacagtgtgatgatattggtacggtgaagattccacgctggctgaaagagtatacagggaaagaacttataatagagacttcttcaggaacagaattcccagatgaccttggttcatacaaaatgatcattcattgtggagggtgtatgctgaatgaacgcgaaatgaaatacaggatcagttgcgcacaggatcaagggatcccgattgcaaactatggaatggtgattgcatatattcatggaatattgaaaaggagtctgagtccatttccggagatagaaaaactcttataaaagtaaagaatgcgttgctggtcgcacatcgtgtgaacagtaacaagaatgcattataacggaaatgacgccgctttgctggatctgcaactccagcaggcggcgtcacttctatggtatgtaattgagaggatcctttagttaccagacagaaacatctgcacacgaaactggggaattcctacaaagaggctgtgcgctgacggtactgctgcggcagggatattcttggggaaaacatccggcgttagcgtactgcatgataactgaagtatctgacctgtaaaaacgaataaaaaaagacagtttctcctcggtaaataggaaaaccgcctttggtcttacaagtcgagataataataccattcgtgtagagcagtgtcaagtgttatgtgggcaaaaaataagattccttataaatttgttactgttcacacgatgtgcgaccagcaacgcatctcgccatttaaaatcgcctttggcgatggggcgagatgcattcaagtcaaaacgcgcattctccgtgccaatcagcggagtgattgacacgggagtgaacagtaacataaattttgcgttgaggttagtatgatacctgatagatcacgacttgagatgagtttcttctatatataatgtgatttgattatgtgtaatatttgatctggttgcaaggaaaatgcaaaaataaatagaaaaaagattgtacttaaaaaaaaacaaagaaagtacttgcaattttcggtactctcggatatactaagagagctgtgacatgatagcaatgaagcgcgaggttgctgcccggcaaatgaataagctggtgcaggttttccgtggagcgaatgtcaagttaggaaactggcgacaagtcactgtacgaatcaaaaactgattactatttgccccaatgggataaccagggtaggagtatgaaacaacgtgtgagtttctcacgacacacacgggagagtgtacagtcaccgcttgtcgtactgatgtgaaaagtacgaaaaggaggcgactttttttatggcaagtcaagtaatgagaatcacattgaaggcgtatgatcatcagcttgttgatgcatccgcaaagaaaatcatcgaaactgtaaaaaagaacgggtcacaggtgagtggaccggtaccacttccgactaagaaggaagttgtaacaattctgagagctgtacacaagtacaaagattccagagagcagttcgagcagagaactcacaaaagactgatcgatatcatcacaccaacacagaaaactgttgatgcactttctagattagaaatgccagctggtgtatttatcgacatcaagatgaagtccaaataataaggacatcttaattttaaacagtattcctaaaatttaggatgagcgcgaaagcgttccgctgtaaatcacaggaggtaattataatgaagaaagctatcttagctacaaaagttggaatgactcagatcttcaatgaagaagacggagttctgattccggtaacagttctgcaggctggtccttgtgtagtaacacaggttaaaacagttgagaatgacggttacagcgcagtacaggttggatatgttgacaagaaagaaaagattgtcacaaaagacaacagtggaaagaagtccatcgctcacagaaacggtgtgacaaaagccgaaaaaggtcattttgacaaagcaggcgtatccggaaagagatatgtaaaagaattcagatttgagaacgctgaagagtatacacttgctcaggaaattaaagctgatatctttgcagcaggagacaagattgatgcaactgctgtttcaaaaggtaaaggtttccagggcgcaatcaagcgtcacaaccagagcagaggacctatgactcacggttccaagttccatcgtcatgctggttctaacggttcagcatctgatccgagtaaggtattcaaaggtaagaagatgccaggacagatgggtaacaagaagatcactgttcagaatcttgaagtagtaagagttgatgcagagaacaatctcatcctcgttaaaggttctgtaccgggaccaaagaaatgcctggtaacaatcaaagagacagtgaaggcaaactagtctgacagctaagaaaggaggaacatacagatggcaaaagtatctgtttacaatatcgaaggtaaagaagttgatacaatcgaactgaacgatgctgtattcggtgttgaagttaacgagcacctcgtacacatggcagtagtaaatcagcttgcaaacaatcgtcagggaacacagaaagccaagacacgttctgaagtttccggtggcggaagaaaaccatggagacagaaaggaacaggtcacgcaagacagggatcaacaagatcaccacagtggacaggcggtggagttgtattcgctccagttccgagagactattccttcaaaatgaataagaaagagaagagagcagctcttaagtctgcacttacttccagagtagaagagaataaattcatcgttgtcgatgagcttaatttcgatgaaatcaaaacaaagaaattccaggcagtactgaacaacctgaacgttaacaaggcgctggtagttcttgaagatggaaacaagaatgttgagatttctgcaaagaatatcccggatgttaaaacagcacgtacaaacacaatcaacgtatatgacatcctgaaatacaacacagtaatcgctacgaaagctgttgttgcagcaatcgaggaggtgtacgcataatggcaaacattcagtattatgatgtaatccttaaaccagttgtaactgagaagagcatggagcttatggctgacaagaaatatacattccttgtacacacagaggctacaaaatctcagatcaaagaagctgttgaaaaaatgttcaacggtacaaaagtaaaaagcgtcaacacaatgaaccttgatggtaagagcaaaagacgtggaatgactttcggaaagacagctaagacaaagaaagctgtagtagcactgacagaagacagcgctgatatcgagattttcgaaggactgtaagatataagacattatacggtgcaaacccgtgaaacaaataatcagagcaaacgaaaggagagacagtaatgggaatcaaaacatataacccatatacaccttccagaagacagatgacaggttctgatttctcagagatcacaaagacaactccagagaaatccctcctcgaatccaagaagagaaaagctggccgtaacgcacagggtaaaatcacagtaagacatcgtggcggcggagctaagaagaaatatagaattatcgactttaagagaaagaaagacggaattccggcaacagttgttggaatcgagtatgatccaaatagaagtgctaacatcgcactgatctgctacgcagatggtgagaaagcctacatccttgctccagaaggacttacagacggcatgacagttatgaacggtgctgacgctgaggttagagtaggaaactgccttccactttcagagattccggttggtacacagattcacaacatcgagctgtacccaggaaaaggtggacagctggttcgttccgctggtaacagtgcacagctgatggctaaagaaggaaagtacgctacactgagacttccttcaggagaaatgagaatggttccgatcatctgccgcgcatctatcggtgttgtaggaaacggtgatcacaacctgatcaatgttggtaaagcaggacgtaagcgtcacatgggaatcagacctacagttcgtggttccgtaatgaaccctaacgaccatccacacggaggtggagaaggtaagacaagtatcggacgtccaggaccgtgtactccatggggtaaaccggcacttggtcttaagactcgtaagaagaacaaagcttctaacaagctgattgtaagaagaagagatggtaaagcgattaaataatcagattcacaaggaggttagaacctatggctcgctcacttaaaaaaggaccatttgcagacgaaagcttacttaaaaaagtagacgctatgaacgctgcaggtgataaaacagttataaagacatggtcacgccgttctacaatcttcccatcatttgtaggtcatacatttgccgtacatgatggaagaagacatgtgcctgtatatgttacagaggatatggtaggccacaagctcggtgagttcgttgcaacaagaacttacagaggacacggaaaagacgagaagaagtcaagagttagataattttcatacattttgaaaggagggttcatccatggcaagaggacatagatcccagatcaaaagagaaagaaacgagcagagagatacaagaccttcagctaagatttcttatgcaagagtatctgttcagaaggcatgtttcgttcttgatgccatcagaggcaaggatgtacagacagcacttggtattttagcatacaatccaagatatgcttcaagcgttatagagaagttactgaaatcagcaatcgcaaatgctgagaataacaacggtatgagcgttgagaacctctacatcgaggaatgctacgcaaacaaaggaccgacaatgaagagaatcaaacctagagcacagggtagagcttacagaatcgagaagagaatgagccacatcacaatcgtgctcaatgagagataggaggacaatatgggacagaaagttaatcctcatggcctgagagttggcgttatcaaagactgggattccaaatggtacgcagaaaaagatttcgctgacaatctggttgaagaccacgagatcagaaagtttttaaagaagagattatacagcgctggaatctctaagattgaaatcgaaagagcatccgatcgcgttaagatcatcgtttatacagctaagcctggtgtcgtaatcggcaagggtggttccgagatcgaaaaggtgaaagcagagcttgcacagttcacagataagaagctcatcgttgacatcaaagaagttaagagaccggacaaagatgcacagctcgtagctgagaacattgctcagcagcttgagaaccgtatctccttcagacgtgctatgaaatcctgcatgtccagaactatgaaggctggagcactcggagttaagacttccgtatccggacgtcttggtggtgctgatatggctcgtacagagttctacagcgagggaacaattccgctgcagacacttcgtgctgacatcgattatggattcgcagaagctgatacaacttacggaaaagtcggtgtaaaggtttggatttacaaaggcgaagttcttccgactaaagcagataaggaagggagagatagataatgttaatgccaaaaagagtaaaacgtcgtaaacagttccgtggtactatgaaaggtaaggctcttagaggtaataagatttcttacggtgaatatggtatcgtagctatggaaccatgctggattcgttctaaccagatcgaggcagcccgtgttgctatgacacgttacatcaagcgtggtggtaaggtttggatcaaaatcttcccagacaagccgatcacagcaaaaccggctgagactcgtatgggtagtggaaaaggtactgttgagtattgggcagcagtagttaaaccaggccgtgttatgtttgagattgcaggagtaccagaggaaacagctagagaggcacttcgacttgcaatgcataaattaccttgcaaatgcaaaatcgtttctcgcgcagacttagaaggcggtgataacagtgaaaattaatacatttgtaaacgagttaaaaggaaaatccgtagaggaattaaatgaagaattagtagctgctaagaaggaactctttaatctgagattccagaacgcaacaaatcagttggataatacaagcagaatcaaagaagtaagaaagaatatcgctcgtatccagactctgattacagaggctaaaagagcatagtgaaaggagcagcaaccgtggaagagagaaatttaagaaaaacccgtacgggtaaggttgtcagcgacaagatggacaaaacgattgttgttgctgttgaagaccatgtaaaacatccactttacaacaaaatcgtaaagagaacttacaagctcaaagctcatgacgagaacaacgagtgtaaagttggagatacagtaaaagttatggaaacaagaccgctgtccaaggacaagagatggagacttgtggaaatcatggagaaagcgaaataattatttgaaggaggtttacctgcatgatacagcaagaaagcagacttaaagtagcagacaacacaggtgcgaaagagttactgtgtatccgtgttcttggcggttctacaagaagatacgccaacatcggagatgtgatcgttgcaactgttaaagatgcaacaccaggcggcgttgtaaaaaaaggtgatgtcgttaaagctgttgttgtccgttctgtaaaaggcgctcgtcgtaaagacggttcctatatcagattcgatgaaaatgctgctgttattataaaagacgatttgaacccacgtggaacacgtatttttggaccagtagcaagagagcttagagagaaacactttatgaagattgtttctttggctccggaagtactgtaaggaggtgcctgagaatgtcaactatgaaaattaaaaaaggtgatatggttaaggttatcgccggaaaagataaagataaagaaggcaaagttattgccgtagataaaaaagacggaagagtcctggttgaaggcgtcaatatgctgacaaagcatacaaagccaagcatggcaaaccagaacggcggaatcgtacatcaggaaggttacattgatgcatcaaacgttatgttacttcataacggaaaagcaacaagagtaggcttcaagatggatggagacaaaaaagttcgttttgctaaggcaacaggcgaagttattgattaattcaaggaaggaggtccaggactttgagtagactgaaagagcagtatcagaatgagatcgttgatgcaatgatcaaaaaatttggatataaaaacatcatggaagtgccgaaacttgacaaggttgtaattaacatgggtgtcggtgaggcaaaagacaatgctaaacttctggagtcagctattgcagacatggagaaaatcgcaggacagaaagcggttgtaacaagagcaaagaattctgtagctaacttcaaaatcagagagggtatgccgatcggatgtaaagttactttaagaggagagaaaatgtacgagttcgttgatcgtctgatcaacctctcacttcctcgtgtacgtgacttcagaggagtaaacccgaacgcatttgacggaagaggtaactatgcacttggaatcaaggagcagcttatcttcccagaaatcgagtacgataagattgacaaagtcagaggtatggatgtaatttttgttacaacagccaagactgatgaagaagcacgtgaattattgacacagttcaatatgccattcgcaaagtaaaaaggagagaaattcatggctaaaacatcaatgaaaatcaaacagcagcgtgcaccaaagttctccacaagagaatacagccgttgcagaatttgtggtcgtccgcatgcatatttaagaaaatacggcatctgccgtatctgcttccgcgaactggcttataaaggacagatcccgggtgttaaaaaagcaagctggtaagacgaaagcaactatatactgtgaaataacataggaggaatcacacacatgactatgagcgatccaattgcagatatgcttacaagaatccgtaatgcaaatactgcaaaacatgatacagtagatgtaccggcatcaaagatgaaacttgctatcgcaaacattcttcttgatgaaggatatatcgcaaaatatgaccttgtagaagatggagctttcaagacaattcacatcacactgaaatacggtgctgacaagaacgagaaagttatttccggactgaagagaatctccaaaccgggacttcgtgtttacgctaatacagaggatatcccgaaggtacttggcggactcggaacagcaatcatctctacaaacaaaggtgtagtaacagacaaagaagctagaaaactcggcgtaggcggagaggttctttgcttcgtttggtaagccgaaagcaacttagtgagaacgaggcgtagccgaagtttgagcttagtgcgaggttgttctttgaacttagcgaggtcctttcgagcttagtgaaaagaacttccttaaatctgctcatctatcgagttgagtggatgattcattataaaaggtacgttctttgagcttagcgaagttttgtcgagcttagcgaaaagaacttccttataaatgtaactgaaaacagagaagccaacgcagcttctccgagaatctaagttaaggaggataatggtatgtcacgtataggaagactgcctgtagcaattcctgcaggagtaactgtagaagttgctgagaacaatgtagtgactgtaaaaggtcctaagggaactcttacaaaagagcttccagtagaaatggaaatcaaagttgaaggcgaagaagtaatcgttacaagaccgagcgacttaaagaaaatgaaatctcttcatggtctgacaagaacactgatcaacaacatggttgtaggtgtaacagacggatacgagaaagttcttgaagtaaacggtgtaggttacagagctgctaaatcaggaaataaactgacactgaaccttggttattcccatccagttgagatgatcgatccagaaggaatcgagactgtacttgagggacagaacaagatcactgttaaaggtatcgataaagaaaaagttggacagtttgcggctgagatcagagataagagaagaccggagccatataagggcaagggaatcaaatatgctgatgaagtaatcagacgtaaagtcggtaagactggtaagaaataaataaggagagtgtgaaaatggttagtaagaaatctagaagcgaagttcgtagaaaaaaacacatgaaattacgcaaccgtttcagcggaacagcgcagagaccgcgtttagctgtattcagaagtaataatcatatgtatgcacagatcatcgacgatactgttggaaatactcttgtttccgcttccactcttcagaaagaagtgaaagcagagctcgagaagactaacgacgttgaagcagcagcataccttggaaaagtaattgccgagagagcaaaagctaaaggtattgatgaagttgtatttgatagaggcggattcatttaccagggtaaaatcaaggcattagcagacgcagcaagagaagctggtctgaatttctaaggaagggagaacacagatgagacaggaacgtattgatgctagtcagatggaattagtagaaaaagtggtatcaatcaagcgtgtaaccaaagttgttaaaggtggtcgtaacttccgtttcacagctttagtagttgttggtgatggaaatggccatgttggtgcaggtttaggaaaagctactgaaattccggaagctattcgtaaaggtaaagaggacgctatgaagaaaatgatcagcgtatctcttgatgaaaactcaagtgtaacacacgatgtgattggtaaattcggaagcgcttccgtacttcttaagaaggctccggaaggtactggtgttatcgccggaggaccggcgcgtgccgtaattgaggcggctggagttaagaacatccgtacaaaatctttaggatccaacaacaaacagaatgttgtacttgctacaatcgaaggacttaaagcagttaagactccggaagatgttgcaagacttcgtggcaaatcaattgaggagatcttaggctaatcaaccgagaagcccgatcaagcgcataggaggtaagattgaaatggcaaatttaaaagttacattagtaaagtctacaatcggcgccgtaccaaagcatagaaaaacagttgaggctcttggacttaagaaactcaacaaaacagttgtattgccagataatgcagctaccagaggtatggtacagcaggttagacatttagttaaagttgaagaagaggcttaattaagataaggaggtaatgtcatggacttatcaaacttaagaccggcagacggttcaaaacagagtgataatttcagaagaggccgtggtcatggttcaggaaacggtaagacagccggaaagggccacaaaggacagaaggctcgttcaggagctacaagacctggtttcgaaggcggtcagatgcctttatacagaagaattcctaagagaggtttcacatgcagaaactctaagacaatcgtaggaatcaatcttagcgcacttgaagtattcgaggacggcgctacagtatccgttgagacattgatcgaaagcggtattgttaagaatccaaaagatggagtaaaaattcttggaaatggagagttaactaagaagcttacagttcaggctaatgcattcagtgcaaaagcagctgagaagattgaagctcttggtggaaaagcagaggtgatctaatgcttaagtccttacgtaaagcattaagtattgaggatatcagaaagagacttctctatacatttgcaatgcttatcgttgttaggttaggatcacagttgcccactccgggagtagatccgacatttattcagaatttttttgcacagcagaccggtgacgcatttaacttttttgaggcgttcaccggcggctcatttacgagaatgtcagtatttgccctgagcattactccttacatcacatcatctatcatcatgcagcttctcacaatagcgatcccaaagcttgaagaaatgcagaaagatggtgaagatggaagaaagaaaatcgcagcgattacaagatatgtgacagttggtcttgcactgattgaatctattgcaatggctgtaggatttggacgtcagggacttctggaagaatataatttcgtaaattgtgcaatcgttgtatgtacgcttacagctggtagtgcattccttatgtggattggtgagcgtattactgaaaagggagttggaaacggtatttctatcgtacttctgatcaacattgtttcccgtgttccggatgattttgtaacactgtatacacagttcatgaaaggcaaaacaattgcaaaggcaggacttgccggtgttattatccttgcagtccttttggttgtagttgtatttgtcatcattcttcaggacggtgaaagaagaattgcagttcagtattccaaaaaagtacagggaagaaagatggttggcggtcagtcaacacatattccgttgaaggtgaatacagccggagtaatcccggttatcttctcttcttcactgatgcagacaccaatcgtgattgcacagttccttggaaaaggaaaaggaaccggaatcggaagtaagatccttgcaggtttaaactccaataactggtgtgatccagagaatccgatttattcagtcggacttgtggtttacattttacttacaatattctttgcatatttctatacatcgattactttcaatccgatggagattgcaaataatatgaaaaagagcggtggatttatccctggaattcgtccgggcaaaccaacagttgactaccttacaaagattttgaattatatcatctttgttggtgcgtgtggtttgatcatcgtacaggtgattccatatttcttcaatggtgttttcggtgcaaacgtttcctttggtggaacatcacttatcattattgtaggtgttgtacttgagacaattaagaagattgaatcacagatgcttgtaagaaattacacaggatttttaaataataagagataacagttattgatattgttttctattaaatgtcttttagctcgctttgttctgtcctcaattgcaggacgaacagagcgggttaaacttgtataaggaggataaagatatgaaactcatcatgttaggagccccaggagcaggaaaaggaacacaggcaaagaagattgctgagaaatatactattccgcatatttctactggagatatctttagagcaaacatcaagaacggaacagaacttggtaagaaagcaaaaactttcatggatcagggtcttctggttccagatgaactggttgttgatctcgttgtagacagagtaaaccaggaagattgtaagaatggatatgtacttgatggattcccgcgtacaattccacaggcagaggcacttgatcgtgcacttgctgcaatgggacagaagattgattatgcgatcgatgttgaagttccggatgagaatattgtaaaccgtatgtctggaagaagagcttgtgttgattgtggtgctacttatcatatcgtatatgctccgactgcaaaagaaggcatctgcgacaagtgtggcggagagcttatcttgagagacgatgataaaccagagacagtacttaagagacttggtgtttatcatgagcagacacagccgctgatcgattattatacagaagcaggagtactcagagaagttgatggtacaatcgatatcaatgatgtatttgctgcaatcgttcagatccttggagagtaagttttgttgatttcattcaggaggattaaaaatgtcaaaaactgacgtgattgaaattgaaggagttgtagttgagaaacttcctaacgcaatgttcaaagtagaacttgagaatggccatattgtactggcgcatatcagcggtaagctgcgtatgaacttcatcaagattctgccgggagataaggttacacttgagatgtcaccttatgacctgagcaaaggaagaattgtctggagagacaagtaagaattctacacatcaaataacaggaatgctgttgtttacaacattccgtatctgaaaagataaaaagatattattttctaaaaagtatttttagaaaataatatcttttttaatttaggacttgactttaccatatgttttgtggtaaagtatgaaatggtcatttttggagaggtgtgtccaaaaataccggaatatataggcagagcaaagtagggaaggaggatttgacatgaaggttagatcatcagttaaaccaatttgtgaaaaatgcaaaattattagaagaaaaggtagtatcagagtaatctgtgagaacccgaagcacaaacagcgtcagggataggcattgaacacttaatgaatgcaagcgtaagcgaagcatgaatttagtgagaaagcccatccggagacttagcgaggtcttttcgagcttagtcaagagatgtatcagaatgtgcaagaaaagcggctgacagcatgacacgccaggaggtgtgtggagctgtttaatatacagtaaggatacaccgcatctgtccgcaggtaccgacagagcgtgtggtctgggcatctaacaggcgtttgtcgtctttctattaaagagggaagatgctattgtatattgcttataatacccggcatttgcattggcggatgagagtatgatccgtgccgggaaagggtatgtagtttccgtacatgcctgggctgggatatcggaaggatacattccggtaggatgcagcagtaaatgagttacaccagacttcatttataaatagaagatactcatttcgcattcgcagcctcaattagggacaatgaacaagaaaaccagaaaagaaaatggaggaaagacacatggctcgtattgcaggtgtagacttaccaagagacaaacgtgtagaaatcggtcttacttatatctacggaatcggtagaacaagtgcagaacgtatcttaaaggatgcaggagttaatcctgacactcgtgtaagagatcttacaagtgaagaagtaaagaaaatcagcgcagtgatcgatgagactcaggttgtagaaggtgatcttagaagagagatccagctcaacatcaagagacttaaagagatcggatgctaccgtggaatccgtcatagaaaaggacttccggtacgtggacagaagactaagactaatgcaagaacatgcaaaggtcctaagagaactgtagcaaataagaagaaataatatcgtataaaataaagaaagtaggttagtttaaatggctaagagagttgcgaaaaaagtaacaaaaaaacgtgtcaagaaaaacgttgaacgcggacaggcacatattcagtcatcattcaacaatacaattgttacactgactgacgctcagggaaatgctctttcatgggcaagtgcaggcggtctgggatttagaggttcaagaaaatctactccatatgcagcacagatggcagctgagacagcagctaaagcagcattagtacatggtcttaagacagtagatgtattcgtaaaaggaccgggatcaggaagagaagcagcaatccgtgcacttcaggcatgcggaattgatgtagtaagcatcaaggacgtaacaccggtaccgcacaacggatgtcgtccaccgaaacgcagaagagtgtaattatactctgctgtataagaaaagcagttatttaatagtaaatgttgacgcagcggcatgagtaccgctggcatgtataatattaggaggatagaaatggcagtaaatagagttcctgttcttaaaagatgccgttcattaggaatggatccgatttacctcggaatcaataagaaatctaacagacagttaaaaagagcaaacagaaagatgagcgagtatggtcttcagcttcgcgagaaacagaaagcaaaattcatctacggtgttcttgaaaaacctttcagaaactactatgcaaaggcaaaacagcaggaaggaatgacaggtgaaaaccttatgatcatccttgagtcaagacttgacaacgttgttttccgtcttggacttgctagaacaagaaaagaagctagacagatcgttgatcacaagcacgttcttgtaaacggcaaacaggttaacatcccatcttaccttgtaaaggctggagatgttattgaaatcaaagagaacaaaaaaggttcacagagatacaaagagattcttgaagctacagctggaaacatggtaccagagtggcttgaggcagacgctgagaatcttagaggtacagtaaaagagcttcctaacagagaagcaatcgatgtaccggttgacgagatgcttatcgtcgagctgtattctaaataataatttgtaactgttcagagccaagcaaaatttcataaaacagctataaaatgcttgcatttttaagactgtttttgaaattttatttggcggatacgccacaccgacgaaatgcgtagcattttggaggttggctctgaacatttacaataatttcgatttgaaaggattgcgcaggctattatgcagggcaatcctaactaatctgaataagttgattagatacagttttgtaccccctcaacatatattaagcccataaggagggtctgtgtagtgtttgattttaataaaccgaatattgaaattacagatgtttcagatgacaagaaatacggaagatttgtcgtagaaccgctggagagaggatacggaactacgcttggtaacgcgctgagaagaattatgctttcttccctgccgggagcagcagttagttctgtgaaaatcgacggtgtactgcacgagttcagttccatcccgggtgttaaagaagatgtgacagagatcatcatgaacttgaaatctctggctatcaagaacacatctgagtctgatgaagtgaagacagcttatatcgagtttgaaggagaaggtgttgtaacaggtgctgatatccagtgcgactctgatattgagattgtaaacccggagcaggtaattgctacattaagcggtggcaaagacagcaagctttacatggaacttacaatcactaaaggtagaggatatgtaagctcagataagaataaaacagaagatatgccaatcggtgttcttccgatcgattctatctatacaccgatcgatcgtgttaacctgacagttcaggatacacgtgtaggtcaggttacagattatgacaaactgacacttgatgtctggacaaaaggtacaatggctcctgatgaggctgtcagccttgcagcaaaagtgttaagtgagcatctgaaactcttcatcgacctgtcagaggtagctcagcaggcagaagttatgattgagaaagaggatgacgagaaagaaaaagttcttgagatgagcattgatgaacttgaactttctgttcgttcttacaattgtctgaagagagccggaatcaacacagttgaagagctcacaaacaagactccggaagacatgatgaaggttcgtaaccttggtcgcaagtctctcgaagaagttcttgcaaaactgaaagaactcaatctggaactgaaccacggagaagaataatattctatatccgtactttgataaattatcaggacacttatgtcctgcacaggctgcattcacaattttgtgaacagtagcccgctgaagattaaatatcctggcggtaagcccgaagagcacgacaggagcatttgattagtaagcccgaagatgcataaccaaatgttaattaatggaggaaatttaaaatggcaaagtatagaaaacttggcagaacagcaagccagagaaaagctttacttagaaaccaggtaacagctcttcttaacaatggaaagatcgttacaacagaagctaaggcaaaagagattcgtaagcaggcagaaagcctgatcgctcttgctgtaaaagagaaagataacttcgaagaagttacagtaatggctaaagtagcacgtaaagatgctgatggcaaacgtgtgaaagaagttgttgacggtaagaaagttactgtttatgacgaagttgagaagacaatcaaaaaagataagccaagcagactgcacgctagacgtcagatgctgaaggttctcttcccggttaaagaaggcgagaagagaaacatgaaagatgttgacatggttgcaaaactctttgatgagatcgcaccaaaatacgcagatcgtaacggtggttacacaagaatcgtaaagattggtcagcgtaaaggtgacgcagctatggaagttctgatcgagcttgtttaatctattttgaatttatagctgaacttagactcccatgtaggatgaatgtcctgcatgggagtttttatatattaggaaagttctatcctaatatataaaaaacactccgcttggatgtgtcaaaactgttcgctgtcaagaaaaaaatcatttttgtaaaaagtgcacaactgatgttaaaaaaataacgttaaaactttaacgaaaggtacattgacaattaattaacgaaccagtatactattaactgtaatcgggaaacataaaaagaacccgatcggataaaacttgcaggttacaaaaacagtgactataaaaatgatttattcaagtacaggaggaatactcagatggcaaagaaagaggcggcaaaaactgtagagacaaagacagtaaataccggattcgttgataacgtagaagctcttgaagcaaaaatgaaagaaatgcgcgaagcacagaaaatcttcgctacatttacacaggagcaggttgacaaaatcttctatgaagcagctatggcagcaaacaagcagcgtatcccgcttgcaagacttgcggtagaagaaactcagagaggtattctcgaggataaggttatcaaaaaccattacgcagcagagtatatttacaacgcatacaaagatacaaagacatgtggtgttgtagaagaagataaggctttcggaatcaaaaagattgcagagccaatcggacttgttgcagcagttatccctacaacaaacccgacatcaacagcaatcttcaaaacactgatctgcttaaagacaagaaatgcaatcatcatcagcccacacccggctgctaaagcatctacaattgcagcagctaaagttgttcttgatgcagcggttaaggcaggagctccggaaggaatcatcggatggatcgatgctccgtcactggaacttacaaacacagtaatgagagatgcagacatcatccttgcaacaggtggtcctggaatggttaaagcagcttactcttcaggaaagccggcactcggagttggagctggtaacacaccggttatcatcgacgacacagcagatgtaagaatggcagttaactcaatcatccactctaagacatttgacaatggtatgatctgtgcttctgagcagtctgtaacagtacttgaaagcgtatatgaagaagcaaagaaagaattccagtacagaggatgctacttcctgaaaccaggcgaggagcttgacaaagttcgtaagacaatcatcatcaacggtgcgctgaacagcaaaatcccaggaaaatcagcttatgaaatcgctcagatggcaggcgttgaggtaccgaagaatacaaagattctaatcggagaagttgaatctgtagatatctcagaagaatttgcacatgagaaattatcaccggtacttggtatgtacaaagccaaaacatttgatgaggcgcttgagaaagcagctcagcttgtagcagacggtggatatggacatacatcttccctctacgtacatccggcagagacagagaagattgcaaaacatgcagcagcaatgaagacttgtcgtgtactgatcaatacaccttcttctcacggtggaatcggagacctttataacttcaagatggctccgtcccttacacttggatgtggatcatggggtggaaactctgtatcagagaacgtaggagtaaaacatctgcttaacatcaagacagttgcagagaggagagaaaatatgctgtggttcagaacacctgagaaagtttacttcaagaaaggttctatgccggttgcactggatgagcttggaacagtaatgcacaagaagaaagcatttatcgtaactgactctttcctttacaagaacggatatgtaaaaccaatcgaagataaattagatgaaatgggaatccagcatacatgcttcttcgaggtagcaccagacccgacacttcagtgtgcacgcaagggtgttgaccagatgagacagttcgagccagatacaatcattgctcttggtggtggatctgcaatggacgctgctaagatcatgtggatcatgtatgagcatccggaagcaaacttcgaagatatggctatggacttcatggacatccgtaagagagtatttacattccctaagatgggagagaaagcttacttcgtagctatcccaacatcttcaggaacaggttctgaggtaacaccatttgcaatcatcacagacgctgacacaggtgttaaatggccaatcgctgactacgctctgcttccaaacatggcaatcgtagacgtagacaacatgatgacacagccgaagggactgacaagtgcttcaggtatcgacgttatgacacatgcaattgaggcatatgtatctatcatggctacagattacacagatggtcttgctatgaaggctgttaagcttgtattcgagaaccttccatctgcatatgagaacggagcaaacgatccgaaggctcgtgaagaaatggcaaatgcttcctgtatggctggtatggcattcgcaaatgcattccttggtgttaaccactccatggctcataagcttggtgctttccaccacctgccacacggtgttgctaacgcagtaatccttacagaggttatgagatacaacgcagcagaagttccgacaaagatgggaacattctcacagtatcagtacccacatgcacttgcaagatacgcagaactcggacgtttcgcaggatgcacaggtaaagatgataaagaagtatttgagaacttcattgctaagcttgaagaactcaaagagaagattgggatcaagaagacaatcaaagattacggtatcgatgagaagtacttccttgatacacttgatgaaatgtcagagcaggcattcaacgatcagtgtacaggagctaacccaagatacccactcatccaggagatcaaagatctgtacctgaaatgctactacggaaaataaattgcattgcataagcaggcatatgaccgttagaatctaaaatatacgagagagatagaatgatgttgaaaagcattgttctatctctttttttacgcgagcaacgagccaaagtctgtgcttgcacaagaccttggcgactgccgcgataacttggaaaatagagtttttgagttttccaagtatacgcgagcaacgagccagagtttgtaattgttaagaaatagacaatatatagcgggtgaaaaaacttgttaaaaactgcacaaacttgcgctgaaggggttttatttttaaaaattgtgagatataatgacatcatcaaaacaaagtaagagccgtaaggcaagaggaacagccccgcagagctgagataaaataagagcagacaagcaggtgtgttcaagatataaggaggtctatattatgaagttagaagaaaaaaatctcatcgtgaaacgtgcttacaaatcagtttacaaatgtgatgactacattgtgaaggtttttaatgaaggacatccgaagtcagatgtatttaatgaggctctgaatactgcaagagtagaagagacaggtttggacattccgaaggtaaaagaagtaactcagattgatggaaagtgggcaattgcgatcgagtacaaagcaggtaagacacttgaggacatgatggaatctgataggaagaatctggaaaaatatatggaagactttgttgatctccagttacaggttcagagtaagaaatcaccgcttctgaaaggaatgaaagataaattagctcgtcagatcaatggattgaaagatcttgatgcgactacacgttatgagcttatgacaagacttgagagtatgccaaagcataataaagtatgccatggagactttaatccgagtaatgtgatcgtaggaaagaatggaaagatgacagtggttgactgggctcatgcaacacagggaaatgcaagtgcagatgcagcaatgacatatcttctctttgcactgaaggatcagaaagtagcagacctttacttaaaactgttctgcaagaagagcgatacagcaatgcagtatgtgcagcagtggcttccgattgttgcagcagcacagttgtctaaagaaaatgaacttgagaaagatttcctgatgagatggattgatgttgttgattatcagtagaaaatagagttgtttctaaaaaaagaagcactggaagatcaaaatgaaatcttccggtgcttcttagtctttttattatttaccaactcgtaaagaaaacgttatcgccaattacaacaccggttctggttgtcgatggtgcgtacaggaagtaataacagtcggctacagaggcaagacgagctccgttgatcgcatcctgtgcaacctggatagaaagacttcgtggaccttgctttaatacacggtctaaggaacctgtccatacaggagcaaactgtcctttggcatagatgacatcatgaatagaattcggaaagcggctgctatatacacgattcataatgactgtagcaactgcaagcatagaatcgtaatcatagtgggcctcacattgcagaattgctgcaagaagtgtaaggtcatcagacgcaatggcagatccggaactattggagccaccagaagaacttgaacttccggaggatgaggaacctgaattaccggagttcccagaggaactggaagtattcgttttgttcgtgctggcagcagcctcagcttttgcagcagcttcagctttcgcagcagcttccgcctgtttcctggcttcttctgcctgacgagctgcctcttcttctttggctttctgtagttttgcattcacctcattcaaattagtagaagttgcagcagcttttgcctgtaattgtgtctgctgtgtctgcaattggttctgtaaatctttcatggaatcctgttgtgcttccaggtctgctttctgatcagcaatctgctggtgaacatctttcagattgttcagcgctttgcggtcgtagttacttaaattttcaataaaatcagctttgtttagaaaatctgacatattttctgctgagaaaagcatctcgagcattgtagcacttccgtgctcgtacatatatttgatacggcttttcatatcttcatactgctgatcttcatttttctgcgctttctcaagatcatcctgtgttttgtctatatcactgttgaggatctcaacctgcatttcagtatcagatatcttctcgctcaaggtgaggatatcctggttgatgccttttaattcgttctcaagggcagaggtctggttttgcagattgtctatcgtgtctgtagcatagactggaagtgcagaaaatacaattgcaagggaacaaatgagcgcagtgcccgtatgtaacttgctttttttgtaaaatgccataatctcaatatcctttctttaaatgacattgcatagttgtcgaaaacctattatactataaaacagagaattaatcaaattggcacggaatattttatgattgttttacgaaaagattaaaaagatgttgctttttgtaacaattgacggatagaaaatacagaagataaggaaaaaagtatggaaaaaaaggaaattaagattgttggattagatctcgatggaacacttcttacagataagaaagaacttcttccttatacgaagaatgtgatcaaagaggcgctgaagaatggtacagttgttcttgttgcaaccggaagaccatggacaggagttccagaggaattacgtgagcttccggggatggattatgcactgactgctaatggggcaaggattattgagacgagaaccggaaaggtactggaagaacatctgttatccaaagaagcagcaaaaaaagcaattgcaatcggaagaaaatatgatactctgttggaagtttattttgatgggcagggatatgctcaaaaagatgagatcgcgcaagtgagaaagtatcataagaatccgaacatgtgggattattttctgagaacacgaatagcggtagacagactggaagatctgctggatgaaaaagaaggggatctcgacaaagtacagatgttgtttgcagatatggaagagagagaagaggcgtggaaagagctggagcgagaaggcgtctttgaactggttggctctcttcaatataatatagaaatcaatgcagttggtgtgaataaaggaaccggacttgtgaatcttggcaagatgcttggaatcaggcgggaagagatcatggcgtgtggggatggcgataatgatatcgcaatgctcaaagaagttggatttggggttgccatggcgaatgccgaagaaaaggtcaaagctgtagctgattatattacagagagcaataatgatgagggagccgcaaaggctatcgagaagtttgttctgaaacgaggaggggaattatgttagaggtattaaaggttatcattttaggaattgtgcaaggaatcacagagtggcttccaatcagtagcacaggtcatttgattctggtggaacagcttattcagctgaaacagagcgaggcatttacgaacatgttcaatgtggtgatccagttcggatctattatggcggtcgtagtaatttatttccataagctgaatccattttcaccgacgaagacggagaaacaaaagaagatgacaattcagttatggattaaagtagtgatcggaacaattccggcactgatcggaggagtgttgctgaacgacctgattgaatcaaaactgagtaatgcatatgttgttgcattgatgctgatcgtttatggtattttattcattataattgaaaaacgtaatgagacaagagaaccgaaagtaaaaagactctcccagctttctgtgaagacagttcttctgatcggagtcttccaaatgatggcgatgatccctgggacatccagatccggagcaacaatcgtaggagcactggcacttggggtttcaagaggtgtggcagcagaatttacattcttcctggcaattccggttatgttcggagcaagtgcactgaagttgtttaaattcggtttggcatttaccccaatgcaggtattcctgcttcttcttggaatgatcgtatcctttgcagtatctgttatagcgatcaagttcctgatgaaatatatcaagaaccatgacttcaaagcatttggatattacagaatcgtacttggtattattgtatttttattctttggtattcaggctttattcaaataatatgcatattatagcttttctttactgttcacagtgtattgtgaacagtaaaattttgtatttgtgcaagaaatagtgcataattacctcttgcattttataaaaagcatgttataattataaacatgttatgaatttttatgcaaaacaagataaaacaggagggtcttaatatgaagaagtttttatcagtattcctcactgcagcactggcagtcagcatgctggcaggatgcggaagtaaaggagagacagtaacagctaaggtaattgatattgaccttacaaatgaagaatatgcatttggtgtggacaagaatcagccggagcttcttgagaagacaaatgaattcattgcaaagattaaatcagatggaacacttgatgagatctgcaaaaagtatttctcagacggagagccggaagcagtaaaatcagcaacacttgatacatctaaggatcagttggttgtagctacaaatgcagcattcgagccattcgagtatacaaaaggtgatgattattacggaatcgacatggagatcgcacagcttcttgcggatgaacttggtaaagagcttgtaatccagaacatggatttcgatgcggtttgtctgtcagtaagtcagcagaaatgtgatatcgctatggcaggacttacaattaatgaagagagagaaggatatgttacatttacagattcttactactcagcatctcagcgtctaatcgttccaagcaacgttacaacattcgacgactgcaagacagcagatgacgttgcagctaagcttgctgagacaaaatcatctgaccagattggtgttcagcagggaacaacaggtcagtactacattgaaggaagcgaagattggggattcccgggacttcctgcaaaatgtgtaacatacaagagtggatctcttgcagttcaggatatgctcaacggaaatattcagtatgtaatcattgatgcagcaccggcagcagcgatcacaacagcaatcaacgcagtacagtaaatgttcgcgaagatttcgtagacagcagctaaaataacagaatttatttacgaggaaaatacaggcagaagataatgcatgcattttcctctttttggggaaaggaaacaaatgggtaattttagtcagaaagtagacaaatttattgatatatttctgaatcagaatggctatgtgaaagtagttcaaggtctgcagaacactcttttgatcgcaatcaccggtctgatcatcggtattgtgatcggtactttgatcgctacagtccgtgtgattccgaaatataaaactcttccgagagtattgaatcatatttgcagcttttacgttgcattattcagaggaactcctatcgtagttcagctccttattttttactatgtactccttccgatctttggagtaaagattaccggagtgcaggtttctatggttgtatttggtttgaatagtggtgcatacatttctgaaattatgcgaagtggaattcagtctgttgaccagggacagatggaagccggaagagcggttggactcagctttggaacaagtatgatgaagattgtgattccgcaggcggttaagaatattcttccaacacttggaaatgagtttatttccttgattaaggaaacttcagtagtaagttttgtcggtgcagcagatctttatgttgccttcaactttatcggaagtaacagctacgaattcatggtgccatatcttgttatggcgttgatttacattgcacttgtgcttgtgatcacattacttgttaaattattagaaaggagcctgaagaagagtgatagacgtaattaatctgcaaaaaagctttggggacaaagagattctgaagggaatcaatgttacgatcaataaaggcgatatcgttgcggtgctcggaccatccggctccggtaaaagtacatttctgcgatgcctgaactgtatggaagacccgacaggcggaagtattattttcaatggtgttgatatcgcagatatgaaggttgatattaatgtacaccgccgtcatatgggaatggttttccagcattttaatctttataataataaaacggttcttcagaatgtcatgatggcacctgcttatttaagatgtaaggacatcgacaaggcgaagaaaaagaaccgtatgatcaaatttaaaaatctgttccgtggaagtgacaagaaggaagagttaattccaatcactgagacaaaggatcagattaagaaagaagtaaaagagcaggcaatggctcttttgaagagaatcggcctggaagacaaagcggatgtgtatccgtctacactttccggtggacagaaacagcgtgttgcgattatccgttccatggctatgaatcctgacgtgattctttttgatgagccaacttcagcacttgatccggaaatggtaggggaagttcttgagctgatgaaagatctggcaaaagagggaatgacaatggttgttgttactcatgagatgggattcgcccgtgaggttgcttcaagagttcttttcattgatgacggtcagattaaggaagaagctgccccggcagaattctttgaacatccgaaagatccaagacttcaagagttcctttcaaagattctttaaaagaaaaatattttatctatagaatatctgtttggtattgtgttacaatattaaacagatatttttatatataaggaaatcgtattgaatgaaatgtaatgaaaaggaaaattgcaaagtagaatttggggaatgtgagagattacatgatatggtagaacctcttgtcgaatggtttcgggagaatcagagagatcttccatggcggaagcatgtgaatgcgtatcgggtctggatttcagagattatgctgcagcagacgagagtggaagctgttaaatcttattacacacgattcctggaagaactgccggatatcaaagcgttggctgaagtgccggaagacagactgcttaagctgtgggaaggacttggctactacaacagggcgaggaatttaaaggtagcagcacaacaggtgatggaagaatataatggtgtattcccggatacatttgaagagataaaaaagttgaagggaattggcagttatacagccggtgcgatcagctcgtttgtttatcatcagcagaaaccagcggtagatggcaatgtctttcgtgtggttacaaggcttctggaagacagtgatgacattatgaaagcaagtacaaggacaaagatagaacgtatgcttgaacaggtgattccggcagaggcaccgggagattttaatcaaggattgatcgaacttggggcaatcgtctgtctgccgaatggagaaccaaagtgtgagagctgtccgataagggaattttgtcttgcatatcaggatgaatgccagatggattatccggtcaagaaaaaggcgaaagagcgaaggatcgagaaaagaacgattctaagattctgtgataatgaggaaattgcgattcgcaaaagaccgggaaaaggactccttgcaggattgtatgaatttcctaatgtagagggacatttgacacaaaaagaagttatagaatatgcaaaagagtcaggtcttacgccggtgcgcgtgaagaagctgccaaaggcgaagcacattttcagtcatgtggaatggcatatgaccggatatgagattttggtggatgagttggaaaaagaatttcagaatcctgagatcatatttgcaggaaagaaggacctggagaaaaattatgcaattccgagtgcattttctgcatatttataaatgaagaggatgagaatattgtggtagctgaaaataaaaatagagcccactctgttttgttgaaaaaaaaggcgaaatatgttataatatctcttatagtttaaaatgcatacgggagagttttagcagaaatgagtacaaaaacagaattatcgaagcagcagaaaaaatcacaggaaacaaaggaaaaaatctttcaggcagcgaagaagattcttcggaagagtggatatgaaaaattgtcgatcaagaatatctgtgaagaagcaggtgtgtcgaacggaagtttctatcatcattttaagacaaaagatgatttgctgtcttattatatagaagatcagcctacgatgggaccggatctgctggagacaccgaaaagtctggaagatgtaaaggacggaattgtccgtgtttatttgaattatgtagcttattgccgtgagcttggtgtagaatttatggcagggtattatgatacaaagaatcaggcattgaatccggcgataagaacagaacgtccatatccgatcgtgacagtacaggcttatgtagagcaggctgcgaaggatgggattattaacgttagagaaagtattgacgaatttacaacagatatccggatgatcgtgatcggaaatgtatttgaatggtgtctgagagagggaaatgctgatttcgaaggcaacatgagtcgttctctaaggcgatatctggacagtacactggaggaaggttgatgatttatcactttattgtgaatccgcgggctcgttcaggacttggcgagatgctgtggaaacagctggaacctgagttgtgcagaaaaagaatcgattatcagattcatctgacaacaaagaaaaaggatgcaggaaagatcgcatcagagattacggaagatggtcaggagcacatgtttgttgttcttggaggcgacggtacactcaatgaagtattaagcggaattaaatcattggagaaggtgacgttgggatatattccgatcgggtcaagtaatgattttgcaagaggaacaggaattccgggagatccttttgaagcattggacacaattcttttacccaaaaaggttgaaaagatggatatcggtgtgctaaaaaggggagggaaaggaagaagatttgcagtaagtgcagggattggatttgatgctgctgtctgtcatgaagtatgcgtttcgaaatggaaacgtgtgttaaatcttctgaaaattggaaagctgagttatgcggttgtggcaatggatcgtattataaaggatcggccagtaaagcttgaactgacaatggatgatggaagcacgaaagtgtttgaaaagacttattttgcagcatttatgaatcttccatacgagggtggtggattcaaattctgtcccgaggcttctggaagtgatggatttcttgatattatggttgtggcaaatctgtcaaagtttaaaattttgtgtttgcttccaaccgctttttcaggaaatcatacaagatttaaaggtgtgacgacattgaaatgtcgcagtgcaaaagtagtaacagatcgtgcactgccgttacatacagatggagaaccttcctttttatcaaaagagatagaagtctcactggaaaaagaaaaacttaatgtgatcgttgaatagaagaaaggtgatgaaacaggatgcatgtagggattgttttagtggttatattatgtatggtaataggactgcaggcttttttaatctttctgctggcgccaagactgtctggcagaaaaagagtgcatccgtttcttggcgtaaagtgggcgcatagaggacttcatgataagaagcgtgggattccggaaaattcatttccggcgtttcgggcggcaatcgaagccggagatggaatagaactggatgttcatctgacaaaggatggacagctggtggtttttcatgatgatacatttgaaagaatctgtggaagacggggcagagtggaagatacttcatatgaagagatgcagaagtacagacttgcggagacaaaagagaggattccactattgtcagaagtactgcagctggtagatggaaaggtgccacttctgatcgaggtgaaacttcctaacacagatacaaagatttgcagaaaattggatgaagaactgcgaaaatatcatggcgaatatatgatccaatcctttaacagcctggtacttcgctggatgaagaaacatcggaatgaaatcccaagaggacaattatctgagaatctgacgaaaaacgacagaacaacgcattatctcttgagattttgtgtaaaatatcttttgagtaactgtatgtgcagaccggattttatttcttaccggtggtcggacagaaagaatccgggattatggctgaacagggttctctttaaaacgccggcagcggcatggacactgcatggagaaaaagatgttaaggcggcaagaagaagctttgatatgtatatttttgagatgagttaaagaagagacagatgttgataattcataagaaaaagaaaagaaatgttaaaaacttatgaagtcggttgagattgtgttttaaaagtgctataatcaagcctatcaaaaaagaacgttaaatgagaatagcgtagaagtagcaagtgctgtatcggtttgatgaaaagcggaggagtgtcagatatgaaatggaagacaaagttcatagagacaatgaaaagatataagcatgcatgggtgtttttatatgcgttaatctatatgccgtggtttttatttcttgagaaacatgtgacgatgaattatcatgtggtgcagaccgcattagatgaagaaattccttttattgaatattttattgtaccgtatatgttatggtttgtatttatcgcagctacatttttatactttttctttacagatgtacagggattttacaaactggcgaagatttcgtttgcaggaatgacaattttccttattatttgttccgtctttccgaatggtcaggatttgcgaccggttgtgtttgaacgggataacatttttgtagatgcagttcggatgctgtatcggacagatacgtgtacgaatgtatttccaagtcttcatgtgtttaatactctgtgcgcatgtattgcaatccgtaagagtcaggcacttaagaaacacaaagctgtttgtatcggagcatatgtgcttggagcattgatcataatggcgaccatgttcttgaagcagcattccgtacttgatgtgacaggagcatttattatggcttatctgttgtatcagtgggtatatgcagaagagacgaagaaagttccgggatattcaaagcgtccggtatttcagaataagtaagagttagaaaaagaattacaggaagtgcttttggctgatgaggtcaggggcactttttaatatattaggaaagtcctttcctaatatattaaaaacgctccgctaaggatgcgcactgcggcgtacaaagtagatgtcgcaagcgaccgccgcaggcgccagaatgtgccaaggcacattctttattcctttcctaatatactgaagtttctatagaaaagcatctgaggaaatgttataataaaaactagtgaattactgtgggcagattagcctgacagttacgaataaagtattacatgagatttaggaggactagagcatgaagaaggttatgcttactggtgacagaccgacaggaagattacacgtaggacattatgtgggttccctgcgtcgtcgtgttgaattacagaatacaggagattttgatgacatttttattatgatcgcagatgcacaggcattgactgataatgctgataacccggaaaaggtacgtcagaatattatcgaagtagcattagactacatggcttgtggattggatccggagaagtctactctgtttatccagtcacaggtaccggaactgacagagttatcattctattatatgaatcttgtgacagtctcaagactgcagagaaacccaactgtaaagaatgagatcaagatgagaaactttgaggcaagtatcccggttggattctttacatatccgatcagccaggcagcagatattacagcattcaaggctactgttgtaccggtaggagaagatcagcttccgatgcttgagcagacaaaggagatcgtacataagtttaattccgtttatggagatacactgatcgatccgaagatccttcttccggagaatgaagcatgccttcgccttccgggaattgatggtaaagcgaagatgagtaagtcccttggaaactgtatttatttatcagaagaatcagaggatattaagaagaaagtattcagcatgtttactgatccgaatcatatccgtgtagaagatccgggaagtctggaaggaaatactgtattcacctatctggatgcattctgtaaaccagagtactttgcggaatttctgccggaatatcagaatctggatgagctgaaagcacattatcagagaggcggacttggagatatgaaggtgaagagattcctgaacaatgttcttcagacagaactggagccgatccgcaacagaagaaaagaacttcagaaagacattcctgcaatctacgagattcttaaaaagggaagcgagaaggcagaggctgttgcagcgcagacattgaaagaagtaaaagatgcaatgaagatcaattattttgatgataaggcactgattgaggctcaggcagagagattttcaaaatagagtgttgttggaacagttataatggaattttgaatcaggataggcggtgcaaatttgagtttgcttatatgtgaacttgaatccggcaccgcctttgcttgagtttgggcaaattgttgggcgtgtgtgcggagagaatcttttgaagttagattttccaaagatacaaaaagactgtaaggaaatttccttacagtctctatagcgtgcgatagaagattcgaactcccggccttctgatccgtagtcagacgctctatccagctgagctaatcgcacatcttattttgttgttctgctgtgtcgctcacaacataaaagattatataacgatgttcgtaaaatgtcaacactatttttaaaattttttaaaaaattatacagcatttaataatacaaaaatgaaatgcaaaaaacaatcaaagatatctacgactattcttctataatctgtatttcaagataatcaaaatcaatctcatcgacaaagttgtcttgataaaatcttgctttagcatgtcgtttgaattcagcaattgttgagtcgagccagagtggcttgcttagatcaaattcataacaaatctcatcaagtgcatgaaaaatcttgtgtgtacgtgtgtcgtctgtctcatcgcagataacagtatcgcaaagcatgcggttgtctttaaattcttttccccataaacgaaacataagagactcctttccggcagcagaagaaaccatctgatcttctgaaaatacctgtctcttgtatcctaacataagaaaaacaaaaagtcatttcttttttagagactttttggtatagtggaacggtaatgttactgtttgtacatcgtgtgacagtaacacggtaatggtaacagcaatatagtaattgatagaatgattggagagcagttatgattagagaatgtacagagacagacagagaaatactgggaggttatctggaagaagacagttatggacaggcaatctttcatctgattgatgaattcggatttgaacagaaatttcagtccgtttatatggatattgaagaagaacagtgtaaaggtgtttatcttatgatttacaaaaatgtactgctttattcgaaagagaaccaggtggaaattgatttcctggagcagatgctctctgtgcttgtgccggagatggtgattggacgaaaggataatgtgaatattgtaagctggcttctgacagactaccggatggataccgtagatcagattccggagctttgtgatgaggaaggcaatgcgttgaagagggatacccggaagaaggaaggacaggaatggggcgtcctgtataaggaggactagaagagcgatgaagagaatatttattgacggactcagcggaatggcgcagggcttgtttgcaacattgatcataggaacaatcattcagcagatcggaatgtttgttggaggaaattatggggatttaatttatctgatcgggaaagttgcagcagcacttacaggagcaggtattggtgtcggagtagcaaggaagctggaggctcagcagcttgttacagtttgtgcagctgttgttggtatgatcggagcattcgcggggaagattctggcaggtcaggtgcttgtagatgggaatattgtattagtcggaccgggtgaaccactgggagctttcgtggcagcttatgtggcaattgagattggaattttagttacaggaagaacgaaactcgatattatcctgacaccattgatctgcattggtgttggtgctgttgttggtttgtttgtcggaccaccgatttcttcctttatgaactggctgggttccttgattaactggggaacagaacagcagccgttccttatgggaattgtagtttcggtcttgatgggaatgatcctgacattgccgatcagttccgcggctttgggggtgattctgaatctgtcaggtcttgcggctggagcagctacggttggatgttgctgcaatatgattggattcgcagttgcaagctacagagagaataagattggtggatttctggcacagggaattggtacttctatgcttcaggtaccgaatattatgaggcatccattgatctggattccatccgttttgtcgagcgcaattttaggacctgtaagtacaatgttactccatatgacgaataatgcaaccggatccggaatgggaacagccgggctggttggtccgttgatgacatggcaggtgatgatccagacagaagatccgatgattgttctggtgaagatcattgtaatccagtttgtacttccggcagtgatcacacttggaatttcagaatttatgagaaagaagggctggattcgccagggagatatgaaattggagctgtagacagaaaatggattacagaggttggaaagatactattacggtaacactaaaatatctctaaaaaagcagtgaattctgtgacagaaaaaggggagtatgttatacttaagatatataaacagaccgggggatgactgctatgagaagtgaacaacaggtagaagctgcgctaaagagttatgaagatgttgacagctggaagacaatcattttcctgtataatgcagcgttgaaagaagttggtacaaagctggagattcttaatgatgaatttcagcatgtacatcagtataatccgattgaacatattaagacaagaatcaagacaccggatagtattgtgaaaaagttgaagaggtatggacatgagacgtctatagagaacatggttcgctatgtgaatgatattgcaggagtaagattgatctgttcatttacatcagacatatatcgtttggcagagatgatagggaatcaaagtgatttgaaagttctttcaattaaggattatattaagaatcccaaagaaagtggatataaaagttatcatatgttagtttctgtgccgatatttctttcggatagtgtagtagacacgaaggtagaaattcagatccgaaccattgcaatggatttctgggcaagccttgaacataagatctactacaaatttgaagggaatgcaccggagtatatcagcaaggatctgcaggaatgcgcgaagatggtatcagagctggatgataagatgctttcattgaatgaggcaattcgggaatgcattgcccaacaggataaggatcagattcagatgaacgaagaactgatgaatgatgtgtgcagagatgttcttggaaataacaaagaatataaagattcgaaagtacaggaaaaagtgacagagattgtaacataagacggtaatctgtagaaaatataaaactgtaataaacgaagtgagctgtggaaaatgagagattcatattttcacagctcttgttgttaaaagtgattgtattgctgttcgcaagatgtgcgaccagcaacgcatctcgttattttaaatcgatttggcgatggggcttgatgattttttgtaggttcggtatactatagcaatagaagaatggaaaatatgaaagatgaggaaaatagatgatgataagaaaaaaactggcagtcttgatgttgattggtgtgacttgtttagcatccggctgtggaaatgtagtcaaggacggaacagaggcgcttggtgaaggaagatatgatgcggcagaggcggcatttgaagaggcaactaagaatgagaataaagaagttgcggcagatggatatcagggacttggaatgacatattatgaacagaaagaatatgataaagcattggaagcatttcagaccgcattggatcagggagcagagcagacgcaggaactttacaatctgacagcagtttgcgcaatgaagacggaggattatccgaaggctctcgaatgtttccaggctggaatcgcacttgcagaaagcaagacaggagatgacgaaacgaaagcagatacagcacttcttcaagaaatggaatataatatgattgtctgctacgaacaacaggcagactgggaaaatgcaaagagtgcgatgaaacagtatcaggcagatttcccggaagatgattctgtaagtaaggaagcagagttccttcagacaagataaaaaggttactgcggtcagtagcagggcgggatgcatattagcagatcatgataagtagataaggaaaagaaaatatgatatcaatggatgaaataaaagagagggtaatcctcgtagcggtagatacagatggatctgatcaggcagaacgatccctggacgagcttggagagcttgcgaagacggcaggtgcagaggttgtcggccgtatgatccagccaagagaaagtatccatccgggaacttatataggaaaaggaaagattctggaattaaaggaattattgtgggagacgcacggaacaggaattatctgtgatgacgagttgacaagtatgcagatggggaatctggaagcagaactggattgtaagatcatggatagaacacttctgatccttgatatatttgcagccagggcagtgtcaggagaaggtaagattcaggtagaattagcacagttaaagtaccgtgcttcaagattggcaggacttggaaaatctctttccagactcggcggaggaatcggaacaagaggaccgggagagaaaaaactggagatggaccgccgtctgatcagagaacgtatcagcagactgaagaaagaattgaaagatgtagagcgccacagagaattgattcgtggacagagaaagcagtcaggactgaaagtagcagcgttagtaggttatacttcagcagggaagagcagtattgagaatgcactgacacaggcaggagtattggaggatgcgatgcttttctcaacattggatacaacaacgagagcactgaccttggataatacacaggaaatccttcttacggatacggttggatttatcaacaagcttccacatcatttagtagaggcatttaagagtacactggaagaagcaaagtatgcggatattatcgtgcacgtagttgatgcttcgaatccacagatggatgcacagatgcatgtagtttatgagacactcagacagcttggagccgaaggaaaaccggtcattacactgtttaacaagcaggataaggttgagaatccggttaatcacaaagatcttcaggcagattattccattgcgacatctgcgaagaccgggcaggggctggaagagttcaaacacgcattgttggagattatccgtaaagagcagatttatattgaacgcttatatgatttcagtgaagcgggcaagattcagctgatccgcagtaagggacagctgttatctgaagaatatgtaccggaaggaattgaagttaaggcatatgtaccacaggatatatatgggcgattataatgattccgggtattccatgtcatagaatagaaaaataaaaagacaaaaaccgtaagaggaagcagttcatagtgatatgcttcaccttacggtttttttgcactgttaaagtttactgcagatacggtgttgccgggctctcagggtaacttcccatggagacaagcagctgaagacctacatctcttgcagtgagaactgcattcttaacggcatccgcatccccggttactgcgacaatcacttcgttcgaatggcttgttccctggtcaggagtcatgtacttgatgacttcaaccggggaagatttcacagcgaggtcagccatgactagtccaatggcagcaggggatccgcagaagaatccaaatggttttccaatcggagcgttgaatgccatatgaagtgctttgtctgcacaggcagagaaagtgaattccaaatgtccggcctggctgatgtagagctcaccggcatatttgccgatatattcaagtgtaatatcaacagcacggcgcacatcagagacgttgtctccgccgatcacgataaaacaaccgtgtccgccccagccttttgtatcacgaggaagttcgatggaaacaatctccgtgttcgtggacttgacagcctcgtcagctgcattgatctgtccggctgcacctgttcttgaactgatcagaccaagacttttatatggcttttttagattcatcttctcgagaagcgaagggtcaattcccgggatgacaagtccgattgtatccaaaacagttgttccgacaaattctgtaagggaacaatcctgtgaaatctgttcaatgtgatgtacgtctatcatatgaatcctccatctattccaataatctgtccggtcatataagccggtgtatctgtgagctttaatgcaagctcggcaacttcctccggatcggcaaaacgtccggaaggaatctcatccataaggtcttggcgttcctcttcatttaaacgaccattcatttctgtatcgatcacaccgcaggcaatcgcattcacctgaatattactcggtgcaagttccttggcaagtgctcgtgtcaggccatgtattcctgatttggttgcggaataagcaacttcacaggaagcgccgatcgttccccacatagaagaaatattgagtatctttccacatttcttagacaccatgtatggaattgcggcacggctgcagtagaagaccgaagaaagattcgtagcaagaatcttatcccattcattgtcagtcatgtcggtcagaagcccgaaccacgcgatgccggcattgttgatcagaatatcaacgccaccacactctttttcaataacctgaaaaattttccggacttcgtcggggttactgacatctccgggaactgttgtacaggatcccccgtctgagagaatctcatgtgcgagttcttctaagcgttccacctggtggacacagttgagaaatacgtgataaccggccttggcgtatgctttcgcacaggcacgtccgatgccgcgggaagaaccggtgatcagtatggattttttattcataaaagaaaacctcagtctttctgagcccttaaataagcggctgatttggagagtgatcatgataaaattctaacgattactcagatacattaactataacataaaatggattggatttcattgtctttcgtaaatggatatgctaaaattttagaaaaggcgttactggatacagtaattaggatagatttgatgatttcggaagaaggagagaacacaatggcaaagacaaaggtaatctgttttacgaataataagggaggaagcggaaagaccacaacttgttcaaatgttggatttggcttgagagagcttggaaaaaaggttctgatgatcgacggagatatgcagctgaatctctccctttctttgtttgacgaagatacagtgcttgcatatgcacagagtgacaaaaatttgtatgaagcaattaagcgacaggatgatctgacagattatatcgtgaatacaaaatacgaaggacttgatctgattccgtcttctacattgatgagttcgattgaatatgaactttttacaaaatggcagagagagtatattttgaaaaaaggattgaagaagatccgcgagtcagaggtttatgattatattctgatcgatgcaccgccgacacttggtggatgggtgatgaatatcctgtgtgcgtccgattatgtgatccttccggtagaggcatctccatggggactgtttggtcttggaaatatgttcgaattcctggacagtgtagaagaaattgcaccggatctcaagcttggtggaattgtgatcacaaaggttgatacaagaaagaattatttcaaacagacattagagactctgcaagagttagatgatgtgaaagtatttgatacttacatccgcgtggacagtggaattgagtggtcgcaggataataatgcaccggtgatcgcatataagaagagcagtagaagtgcgaaagagtacatggaattaacgagagagattgcagctacattaaaaggataaaccagaaaggcaggcaatagatgcatcaggaactgatccgggaactggcgatgatcacagatgaggaacgccggatccttgaaggaaaacaggagatcgatccacagctttatacagaaaagaaggaaatggttgtggatagtgcgaaacttctgaagaaggggaagttgatccaggtcagaccgcatactcgctttgtacatttcccggcgcatacacacaattatatagaagtaatttatatgtgccagggaacaacgacacatatcgtgaacggcaatcaggttgtgctcgaacagggtgaccttctgtttctgaatcagaatgcagtgcaggagatccttccggccggagagtatgatattgcagtgaactttattgtcctgccgaagttttttaacacagcattctctatgatcggcgcagaagaaaatcagctgaaagatttccttgtcggggcgttgtgcggaagagatgaagagacgtcttatctgtatttccatgtggctgatattctcccggtgcagaatctgatcgagaatatggtttggacgatcttctatgacatttccaataagcgaagcagtaatcagatcacgatgggacttttgtttcttcagttgttgaattatatggataagatggaagccggcggacgcaaatttgacacagagattatggcgaatgtgtatcgttatatcgaggatcattttaaagaaggtacgctgtcagaactggcggtagagatgaaagtggatgtctattggctgagtcgtgagatcaagaagaaatcagggaagacatataaagaacttcttcaggaaaagaggatgcagcaggcagtgtatcttctgataaacagcaggattgcggtgtcggatattatagaagcagttggatatgacaatacaagctatttttatagaaaatttaaagaacgctacggaatcagtccgaaaggataccggattgaaaacatgaaataagaataaagtatagagaggatgctatttttcacagatggcatcttcttttttgcgcgaatagtaaaccaatgactatactgatataagaattggcaatttgcattaatagaaacgcgataaaacggataaaaataaaaaaacgacgaaataaaaattgtgaaaacaatatcaaatagcactatgcataaaagaggataggatgtataatgaattatatgtgaaaaatacaaaaaggaggaacgcaatgttagatatatcctattatgaaaaaacagatgagattattgcacagtatacatgtgacgaaaagtctttgatcccgattatacaggggattcaggaagaatatcgctatcttccaccggagcttttaacttatgttgcggagaaactgggaatctccgaggcgaaagcttacagtgtggcaagtttttatgaaaatttttcttttgaggcaaaaggaaaatatgtgataaaagtatgtgatggaacagcctgtcatgtgcgtaaatccattccgattctggaaggactttacaaggaactggggcttgggaaaaagaaacacacaacagatgaccagttgtttacagtagagacggtttcatgcttgggcgcatgcggactggcaccggccgtaatggtcaatgatgaagtacatccgaaaatgacacctgagaaaatgagcgagctgatcaagaagctgcgggaggaagaggaatgaggatagaaaacagaatgcagctccagttatggagagaagagtgtaaggaaaagcggcagaaagaaaactgctgtattctggtctgtggaggaacaggatgtctggcaggtggttcagataaaatatatgcccgtttgaaagaactaacttccaatatggatcatgtaacagtcaaaatcggtgaagaaatcgctcatgtgggacttaagatgagcggatgccatggattctgtgagatgggtccgctggttcgtattgaaccttataactatctgtatctgaaagtaaaactggaagactgcgaagaaatttttgaaaagacgattcttcatggagaaccggttacaagattgatgtatgaagataatggtcatgtatatcagacacaggaagaaattccattctatgccaagcagacccgtctggtgttgagaaactgcggtcatattgatgcagagcatattgaagatgcaatggcggtaggagcatatgagtctttcgaaaaagctgtgtttgaaatgactccggaagcagtgattaagacggttacagatgcaggtcttcgtggaagaggcggagcaggatttccggcgggaagaaaatggtcacaggtagcgagtcagccggaaaagatccgttatgtagtctgtaatggtgatgaaggggatccgggtgcatttatggatcgaagcgttatggaaggtgatcctcaccgaatgatcgaaggtatgatgctggcagcttatgcagtacaggctcaggaaggatatatttacgttcgtgcagagtatccgctggcagtacgaagactgcagatcgctatcgctcaggcggaagagaaaggacttttgggagagaatatccttggaacaggattcagcttcaaattacatatcaatcgcggagcaggtgcttttgtatgcggggaaggttccgcgcttacagcttcgatcgaaggcaagcgaggcatgccgagagtaaaaccaccgagaacagtagaacagggattatgggagaagccaaccgtattgaataacgtagagacttatgcaaatatcccgatgatcattaaaaacggagcagactggtacagccgtattggtacaccgcaaagcccaggaacgaaagcatttgcccttaccggaaatgtaaaaaacaccggattgatcgaagtgcctatgggaataagtttacgtgaaatcatctttgatatcggaggcggcatcaaggacgataaagggttcaaggcagttcagatcggtggtccatccggtggatgtctggtggaatcccagcttgacagtaagatggattttgactcactgtcaaagatcggtgccatgatcggttccggtggacttgttgtcatggatgaagacacctgtatggtagaggttgcaagattctttatgaacttcacacagagagaaagctgtggaaaatgtgttccgtgcagagaaggaactaagcgtatgctggagattctggaacgtatagttgccggaaacggagaaatgagcgaccttgatgaactggaagaactggcagacatgattgaaaataccgccttatgtggtcttggaaagagtgcgccaaagccggttgtaagtacgattcatgcattccgaaaagaatatgaagagcatataatagataagaaatgtcgtgcgggagtctgttctaatcttcgtgtgtttaagattgatccggagaaatgcaaaggatgttcgaaatgtgcgaagaactgtccggtaaatgcaatcacaggaaaaataaaatcaccatttacaattgataattcaaagtgcatcaagtgtggaagttgtatcgataactgcccatttggagctgtttatacagagtagggaggatagagatttatgggaattatgacaattgacggacaggccattgagttcacggatgaacctaatgtattgtctgtaataagaaaagccgggattgatatccctaccttgtgttatcattcggaattatctatctatggtgcctgccgattatgcacggtagaagatgacagagggaaaacatttgcctcatgttcagaaaagccgagagacggaatgattatttatacaaatacaccaaggctgatgcgctaccggaaactgatactggaactacttctggctgctcactgcagagattgtacgacatgtatcaagagcggcgagtgtcatctgcaggaactggcgcaccgtatgggagttcatgagatccgctttgaaaatgtaagagagatacagccaattgatacaagttcacacgcaattatcagagatccgaataaatgtatcctgtgtggtgactgtgtcagaatgtgtgataatgtacagaatatcaatgcaatcgacttcgcgtatcgtggaactgatgcacaggtaataccggcatttaataagaagattgcagaaacagactgcgtaggatgtggacagtgtcgtgttgtctgtccgaccggtgcaatcagtattcataccaatattgatgaagtgtgggaagctttggcagacaagaatacaaaggtgatcgctcagatcgctccggctgtacgtgttgcaatcggtgataattttggttatgccaaaggcgaaaatgtaatgggtaagttagtaggagtactgcatcgtctgggatttgatgaagtatatgacacatcctatggcgcagacctgacagttgtggaggaatccaaagagtttattgagagatttacttccggtgagaagatgccactctttacatcctgttgtccggcatgggtaaaatattgtgagaataaatatccggaattcgtgccgaatctttcaacatgcagatcaccgcagcagatgtttggagcagttgtaagagagtattataaagatcctgagaaaaatgaaggaaagaagattgtatctgtatcaattatgccttgtacggcgaagaaggaagaaatcttacgtccggaatcttatacaaatggcaagcaggatgttgattacgtgcttacaacaacagaaatcgtaagaatgatccgcaaatcaggaattgtatttgacaaagttgagatcgaagcagccgatgtaccgtttggtatcggctccggaagtggtgtgatcttcggtgttaccggtggtgttacagaggcagtgctccgtaggctgcagcagggacacaacagagtagacatggagtctattaaaaagagtggtgtgcgtggggacgacggtattaaagtgctgacttataattataatggaagagagattaaggcggcagttgtaaatggccttgcaaatgcagataaagtattgcagcagattaaaaatcacgaagcagagtatgattttgtggaagtgatggcctgccgcagaggatgtatcatgggtggaggtcagccggtgaatgcaggaccgagaaccagaaaagcaagaatgaagggcttatatgatacagatgtaaacactcagatcaagaaatcaaatgagaacccaatgattctttccttgtacgatactttgctgaagggaaaagagcatgagcttcttcatagaaatttctccggtaaatagagtgtctgttttgtggagagaaaacattttaaataacactacacaatatcaacaaaaatgagggtttgaaattgtacaaaatgcaaaaaggaaccctaaaaataaaatacagtgcaaataaggacgctatttttcgtaaataacgtcctttttttacatagaaagcgtggatataataaagccataagaaatgaacagtaatagaaaaataacaaggaggcaccaaaacgatgggcaattattatctggcagttgatatcggagcatccagtggacgtcatatgctggcatccatggaagatggaaagatgaaactggaagaggtttaccgttttccaaatggaatggataacaaaaacggtactttatgctgggatgtagatcgtctttttacagaaatcaagaacggattgaagaaatgtaaagaacttggcaagattccggcaacaatgggaattgatacttggggagttgactatgtgcttcttgatgagaaggatcagatcctcggagatacagtaggctaccgtgacagccgcacaaacggaatggatgagaaagtgtatgaaaagatttccctttccgcattgtatgagaggacaggtatccagaagcagatattcaatacaatctatcagctgatggctgtaaaagagactcatccggagtaccttgaacaggcaaaagcaatcctgatgatcccggattactttcatttcctgctgacaggtgtgaagaaaaatgaatatacaaatgcgacaacaggacagcttgtgaatccgacgacaaatgactgggattatgaactgatcgatatgctcggatacaacaaagagatgttccagccggtatctatgccgggaacagttgtaggcgaatttacgcaggacattcagaacgaggttggattcaactgtaaggttgttcttccagccactcatgatacaggctcagcggtacttgcggtaccaaccaacgatgacaatgccatttatatcagctccggcacatggtctttgatgggaattgagagaaaagaagcggactgctcactgagaagtatgcaggcaaacttcacaaacgaaggtggatacgatcaccgtttccgttacctgaaaaatatcatgggactctggatgatccagtctgtaaagaaagaattcacagaggatctttcttttgcagagatttgtgagagagcttccaaagagacgatcacatctttagtagactgtaatgatgactgcttccttgctccgaagagcatgattgaagctgtgaagaagttctgccgtgattccaagcagcaggtgcctgaaacagtgggcgagattgcagcagttatctacaacagtcttgcaaaatgttatggcgatacgatcgaagagattgaagcattaacaggaaaaaaatacactacaatctatgttgtcggtggcggtgccaatgcaggatatcttaacgaactgacagcaaaatatacaggaaaaaaagtttccgcagggccttctgaagctacagcaatcggaaatattgttgtccagatgctacatgatggagtatttaaagacctgccggaagcaagaacatgtgttgggaaatcgtttgatgtaaaaatatacgaaaaaatgtaggaagtaaaaatgattacggatataataaatattttgtaactgttcagagccaagcaaaatttcataaaacaggtataaaatgcttgcatttttaagactatttttgaaattttatttggcggatacgccacaccgacgaaatgcgtagcattttggaggttggctctgaacagttacatttcacgaaaatggaggaagaaaagatgacaagatatgaatccgcaaaagaaatctatgcaaaattaggagtggacacagacgcagcaatcgcgaaatgtaaagaaattccggtttctcttcactgctggcagggagatgatgtaacaggatttgaccacgacggccctctgacaggaggaatccagacaacaggaaactatccgggaaaagcaagaactccggaagaactgttagctgatatggataaggcaatgagcctgatgccgggtaaaaagaaaatcaatgttcatgcatgctacgcaatctttgaagatggtgaattcgtagatcgtgataaattagagccaaaacatttccagaaatgggttgattttgcaaaagaaagaggaatgggacttgattttaatccaacattcttctcacatccaatggtaaaagacggacttacactttcaagcccggatgaggaagtaagaaacttctggatcgagcatggaaaagcctgcatccgcatttcgcagtattttgcagagcagacaggagttccttgtgtaatgaatatctggacaggtgacggattcaaagatatcccggctgaccgtatgggacctcgcgtacgttataaagagtctattgatgcaatcctttccgagccatttgacacaaaccttgtaaaaccttgtgtagagtctaaagtattcggtatcggtgttgaggcttatacagtaggatcagcagaattctcactgagctacgctgcaatgaacaaagacaaatgtctgccactgatggataacggacattatcacccgaccgaagtagtatccgataagattccggcactgcttacattcttcccagagatcgctctgcatgttacacgtccgatccgttgggattcagaccatgtagttctctttgatgatgagacaaaagagattgcaaaagagatcgttcgctgcgagaacggaattgaccgtacatatattgcactggactactttgatgcttccatcaaccgtatttccgcatgggtaacaggattccgcagcttccagaaagcactgcttgatgcactttgtcagccaagcgagatgctgaaagaacttcaggatacaaaccagatgagcaagaagatggttgttatggaacagtgcaagacacttccaatcggtgatgtatgggaagagtactgccgtcagtgtggtgtagaagctgaaggatggtttgacgagattcaaaaatatgaggatgaagtgctgtctaagagagcataaaaaattgcaatatcgtacctgatgcagagtgttgaactgctaaaaaggatatagtttatgtgagaaagagactcccggaattggtggaaaatcaattccgggaattttttatatatagaataatagagaaaagtgttttattatgggcgttgcacaatacgcaacatgcgatgaaaaagtatgctgaagaagatagacaatgctttttgacaagattaaaatatactcagaagatatattaaaaatgtggtgttttatatcgaaatatacagaaatagttatgatagaggattttctgtataaaagaaaggggcaatgtaatatggtacagtcattagcgagaggaatagaaattttgtcgatcattcaggaaaagggaagtacaacagcggtagagattgcgacagaacttgatgttgataagagtacggtttcgagattgatttcaacattgatgcagtacgatatgattagcatagatcctattagcaagaagtacagacttggatttcgcctgttatatcttagtgaaggtgtaaaacggaattttaatattgcgatgatcgcccggccgtatctgtataaaatctgtgatgagacgaaagaaagtgtacatcttgcagtaatgggaaataaaaaaatgtatattgcagatcaagtgagaagccagagggaatataatctgtcagcacaaattgggatgattgaagcatggcactgtagttctgtaggaaaatgtgttttggcatataagccacagtctttcattgagaatttgttttctgattatgattttgaaaaatatacgacacatacaattgataatttccaggatttggaaatggaattaaaaaagattaaagaacagggatatgcaattgatgatgaagaacggacattgggagtaaggtgtatggcagttccaatctttaattatggaggaaatgtgagttactgtattggaatttcagcaccaaaggaacagattacagaaaaaacgaagaaacaatatatttcctgtatgaaaaaatatgctcgtcagatcagtaatgagttaggttatggattatatcataaggtatgagaatacaagtcttggatcaataaatagtgttggttcgagactttttatatattaggaaagaactttcctatttataccttgaaattatgcaaaaacactaaaaacaaggaaaaaacatgggaaatatatataaaatgcacatggttgtataatgcgcaaccaggaattaggttttatttcccaatctatttttcctatgctagaatgacatcaagtaaagaaaaagagtaaatgcctggcaggaaaatagaaggagggaagaaaaagagtacaaaatgtttaggtcctgataacataaagtcagaaaaagtattgaggaatagctatgaaggaaatgattgaacaaagaagaaaaagagcgaaagcgataaaggaatatggaacgcttagaaaagcagttgaagcaggagcacttgagcagtttcaggatgtcagtcttagcgaagcagtggttttaggtctggtgaatcaagaggttcggacttttgttggaatctttggacatggaatgacagatgtaggtgaagcgcttcgtatttatgaagaggaagacgttataaaaacatataatgtccgaaacgaggtagaagcatctcatattgcttccatgctccgttggaaatacaatcaggtgtcagcagtatttacatcgattggaccaggaggaatgcaggcgaccgcaggatcccttgttccactggcaaatggactaggtatctattatctgatgggggatgagacaagtcagagcgaaggcccgaatatgcagcagattccaagaagagaacaggaattattcttgaaagtattgtctacactgggaccggcatattcacttcatactccagaagcaatatttacagctttgaagcgcggagatgcaacagtgaatggaaaagaaaaaagatccccattctatatgcttcttccaatgaatatccaaccgaaggttatgatagggtgtaaccttttggaattcccagaaaaatcaccggaatcaaaggtgatcagtattgatcaggaaacctacaacgaagcggtgaatgcaatttgttctgcttcaagaattacagtaaaaacaggaggcggcgctgccaatattgatggaaaagtattagaagaattccttgaactgactgatgcagcttatgtgcatggaccacaagtcccaggaatttatccatattctaaagaacggaatatgagtgtgggaggttctaagggatcaatttgtggaaattatgcgatgaatgaatgtgatcttatcattgcattgggagcaagaggggtatgccagtgggattgttcaggaacggcttttcgaaaagcaaagaaaatgatcaatatcaactgcgattatgatgatcttggtcaatataataattcggtgagaatccagggtgatgcgcaggaagttctgataaaacttaacgagttactaagaggaagaaacctgaattccgatccagagtggattaaagggtgtgttcagaagaaagaagagtgggaagcttacaaaaagcttagatatgatcagccggtccttgaagatccaaaacgaaagaagaagattcttacagaaccggcagcaatcaaaattgcatgtgatttcgcagcagaacacgagtgtattaagatctttgatgcaggtgatgtacaggcgaacggttttcagattgtgacagatgaaaaaccagggtataccatttcggatagcggatcttcctatatgggatttgcagtttcttctacacttgcctttgcgatagcaggcaataaggattatccgatggcgttcacaggagatggaagctttatgatgaatccacagattctaattgatgcagtgcagcatggattaaagggaatgatcctcttgttcgataaccggagaatgggagcaattactagtctacaaaacgcacaatatagtatagaatataaaacggacgatcaggttgtagttgattatgtgcagatggctgaagcagtacagggagtaaaaggattctacagcggagaaacaccggaggaaatgaaagaagcgttagcgaaagcatataagtatgacggtctgtcactaattcatattccagtacattatggagatgatgaattatccggtctcggaacatttggagactggaatgtcggaaactggtgtgaacgtgtgcagaaaatgaagcatgagattggtttttaattaagaatgtacaggcggaaggcctgaaagataaaggaggataacatatgaattacgagattcctgagaagatgaaggcgtgggtactgggaaatccaggagaactgacacttgaggaaaaaccagttccggaaccgaagagagcagaggttttgatccatgtggatgctgttgcaatctgtgcaacagatttggagattattaagaacggtccaccagcactgatccagggaggacttccatttaataagggatttactccgggacatgaatatatgggaactattgtgaagcttggacctggagttgatgagtataaagttggtgatcgtgttgcggttgagattcatgccggatgcgacagttgtgaaagatgtcgcgaaggaatgtatacttcttgtctgaattatggacagaactatgaagggcatgataaggggcacagagcaaatggattcacaacagacggtggatttgcagaatatgtaatcaatagcgtaaaaacattatgccatgtaggagacaatgttacagatgaagaggcaacattgatcgtaacagcagggacagcaatgtatggtctggatacgctcggcggattgtttgcgggacagtcactggttgtgacaggacctggaccgatcggacttatggcagtagcagttgccaaaacacttggagctaatcctgtaatccttacaggaacaagagacaatcgtctggaacttggtaagaaattgggcgcagattacacgattaatgtaagaaatgaaaatgttgttgagaaggtaaaagaactcaccaatggcgaaggcgtacattatgtaatggaatgttcaggagcaccaaatgcagtaaatgaggcggcagcaatggtaaaacgtggcggtaaagtgtgtttggcagcgtttccgtccaaaccagtagaagttgatgttgcagcacttgtaagaaacaacatttctctgtttggaatcagaggagaaggaagaagcgcagtacacagagcagcgtcactgatcagtgagaagagatttgatgcatcactgatccatacacatacattcaaatttgatgagctacttacagcattgaaatattcaagagagagaattgacgatgcaattaaagttgtagttaagattccaggttaaaaaagcaggagagtaatcgtatgattcagtacaaaaaatattacatgcccggtacaaaagaagagcttttgaaaacaatcgatacgatagattgtacttatgatattctcgctgggggaacggacctttatgcaaaagaaaaaactcctttcaatggagcggatgcagcgatagatatcagcggaataaaagagttttctgtcattaaattgaaaaaagaagagggattgataacctttgggtccaatatttgtattcagcagttcctggaagagaaggtgctgatggagaatgtaccgattctgcgacatgcagcgatttatttcgcggatcagcagatcagagagatggcaactgtcggaggtaatgtggcaaattcctcgccttccggagatacgattgctccgctgacagcgttggaggcggtgattcatacgattacttcaaaagataataaaatatgtgaaaaagagacaccaattacggaatttattaccggtgtgggaaagaatttacttgaaaagggagaagtgatctcttcaatcacttgtccggttttaaaagaatatggatgtgcattcaagaaagttggactgagacgttccctgtgtatttcaacagccagttctgcattccttgttaaagcagatgcatcgaagacacattttgaagatgtgagaattgctttcggtgcaatcgggccggtgccaagaagaatgatggagattgaagacagactcaaaggtgaagttatttcaaaaggactgatccagaagatggaagaatatattccggaagatgtggtacggtctcgaagcaggaaagaatacagaagaaatgtagttaagaattttacgctggcaggaatatatgaagcattggcagagattgggattatcccacaatagtaacaaaggcacaaatcttaagaggttttaaaagagtggattatggagatggaacgagtaaaaattgaattgacagtaaatggaagaaaggtatgtaagtatgttgctccggcgatgagactggccgattttctaagagaggaactccatttaataggaaccaaaaaaggatgtaatgccggagaatgtggtacctgttctgtattgatcgacggtgtacttaagaaaagctgtctgataccggtcatgaaagcaaatcacagagaaatcgtgacgattgaaggaattgggaaggctggtcttagtattatccagagatgctttctgaaggtgggggctgtccaatgtggatattgcacaccgggaatgattatggcagctacgacaatattgaaagaaaacagacatccggacaaagtggagatcagaagaagactcggtggaaatatctgccggtgcactggatatgcgaagattattgaagcaatcgagcttgccagggatattctcaatcatgaaattagtgaagagtgcttggaagtaattcccccatctacagggaaaacaataggatcctgtgtagaaagggtggatgcaagaggcaaaatgacaggggcattagagtacgcagctgatatggaaatgccaagaatgcttcatattcatcttgtcagaagtaaggaagttcacgccgaaattttgaaaattgattatgaaaaagcattggaaatgccaggtgttgaaacagtaattactagtgaagatgtgccgggagaagatagattcggcgtatattatcatgaccagccagtattggcgaaaggaaaaatccgtttttatggcgaaccagttgtggcaattgtggcagagacacttgaagatgcagaagaagcagaaaagggtgtagagattacatataagaagctgccggttgtatccaatatacaggaagcaatcgagtgtaaagctgttttacatgaggatcatccggataatattgtatctacaacttgtgtacaaaaaggcaatgtggaagaaggatttaaaagcagtgaaattattatagaaaaagatttttctactcaggcagttgaccacgcatatcttgagacagaagcgggaatttcatactgtgatcctgatggcacgatagttgttaaatcatgtgatcaggatattacccatcatcgagtactgcttgcaaagatccttggaatgccgattaataaagtaagggtgattatgtctccggtaggaggaggatttggtggaaaagaggatatgatctatcaggcgattcttgcaattgcaacactgaagacaaatcagccggtaaaacttgttttctcaagagaggattccatgataggaagctgtaagagacatccggttacaatgcattataaaattggcctgaagtccgatggaaagattcaggcggttaaggcagaaatcaggtctgacggaggggcatactgcttctcaaccaaaggaaccgttgcgaaatctgcaatttgcggagcaggaccatatcagattgagaatgtcaaagtaacggcgacgggctattatacgaacaatactccatcaggtgcaatgcgtacctttggagtgcttcaaccaacttttgcaattgaatcgttgatggacatctgttcagagaaacttgggattgatcctatagaacttcgcatgattaacggaatgaaagacggcgcggtaacacatacacggcaggtacttggtaaagtagcttatacagagacactgaaaaagtgttctgagattgctggatgggaagttggatcatcaagagtaagggggtcggtaagaaaagatataaagggaagtcagattgcagaaccttatattcctggaaaggaatttaagtcagaagaggcaatgaaactttgtagagataggtttaaatacggacgtggtgttggaacaggttggtatgggattggaagatgtgcaacaatagataaagcaggtgcatttgtcgagattgatgacggaggtacagcgatgatcctgaccggagtaagtgaaataggagaaggaattctgacagtcctgacacagatcgccgcagacgaattgggaatgtatccggaggatattacgattggagataatgatacggcacgagttccagaagcggcacatgtcggtgcaagccggcagacttatatgattggaaatgcagtatgcaatgcatgcagagacgtaaagaaaaaatttattcgtgaaatggctgcttattggaatatagatagctcttcaatatgtatgaagaacagaagaatctatgtggaaggaaatgcacaatataatttgtcactgaaagaagcagtcgatatatgtaagaaagtaagaggtattgttccgttgggctctggaacatataccgcacaccatgaaggactggatccggttgatggaagaggaaatccatggcaggcttatgtgttcggaacgcagattgcagaggttgcagttgatacttttaccggggaagtccatgttcttggaatttgggcagcgcatgatgtgggaagagtaattaatccgcgaggggttgaaggtcagatcgaaggaggagctgtacagagtatgggacagacaattatggagaactatgtgttgtcagagggagtcccgacaaataagaattttgccaagtacattctgccgaccagtgtagatgttccggagattcattcttacctggtagaagaaagagacccattcagtccagtgggcgcaaaaggaatcggggaacctgctccgttgccgacagcacccgcaattgtgaatgcaatttatgacgcagttggtgtccggattacttcacttccggcgataccggagaaaatattaaatgagatatcgaaaatgaaaaattaaaaaacgtcagatacatgttatatcataatgtatcttccaagaaaaggagaagagaattatgagtagtacgagaaatacagttggtttatcagtaaatcaaaagaaatggatctatatagcgatcagttttgcggcaatgatgattattaagaatgtgacattcccatcatcgattacaacaatcaatggagcagaacttacagcgacaggacaggaagcattatccgttctggttctggcattgctgttatggatcacggaggcaattccattccactttacaggaatccttgcaatggcacttctgtcagtatttggagtaaattcatttgctaatattgtaaaggtaggatttggaaatattaacgttatcttctttattggtgtatttattttaagtgcatttattaataaatcgggactaggaaagcgactggttaatatctgtctttcaattaccggtaacagcacgaagtttattttacttggttttattgttacaggagttattctttccatgtggatttccaatatggcggttgcggcaatgttaatgccactggcgaaatcacttctggatgaagaaggcgtagaaccactgaaaagcaattttggtaaagcacttatgatgtctgtagcatggggaagtctgatcggtggatttgggactccggcaggaaacggaccaaacccactggctattggatttatgaaagatatggcaggcgttgacgtgtctttccttgactggatgaaatatggtgttccaatctctattatcctgatcccagtagcatggggacttttaatgttggtgttcaagccagaaatgacccatttgaaaaaatcaaatgaagaaatcagaaaagaatttaaaaatcagccgaaactcagcagagatgaaattgtaacattgattatctttattgtaacagtgctgacatggatcttctcggcacagttaaagaaactgcttggaattgatcttccaatcgcattaccgattgcttttacttctatgctgttcttcttcccgggagttagtacgattaagtacaaagagattgaaaaatctatgtcatggagcagtatcattcttgttctttcaggtgtatcacttggaatggttctgtatgattcgggcgttgcaaactggattgcattaggattgttaggacgtatcgaaaatttaagtccgattcttatggtatttgttgttgtgcttagtgtatctattatgaatattactctttcaagcgcaacggtatcagcaagtattgttataccaattattatcggactagcaatgaacattggtgtgcatacgatggcacttgcatttccagcagcattggcatcttcactggcgttcattttgattacatcaacgccaacaaatgttattgcctattcagcgggatacttttcaatcaaggattttgctaaagtcggagttattatgactgtgttttcctgtatcgttgtagcagtcgtaatgtacggcgttggtttgatgacaggattgtattaggaggaaagaaaggaaaaggaatcatatcgtatggtatggttctttttttggttgcataaacctggcaaactgcatccgtgcttgcacgagatgcaatttgctaggtgtaagtgcagtaagatcatcgagcattaggtgagagaattaagtataacagcgagtaggcatcagttagttcaagcgaaaaaagctaattcgactggtgttgcacaatgcgcaatcagggagggggaaatcattgcaggtagagggattaaatatataatttaaattagtagaaaaaggattggaatccaatcagaatcaattcacgatcaaaggaggaattaacatgaaaattgcagtgatcaatgaagtaagtgcttcgcttagaaatgaggatattatgaaagcattgcataagacaacagacgcagagattctgaatgtaggaatgaagactccggagcagatgccttctcttacttacatccataccagttatatggcagcaattcttctgaatacaggaagttgtgattttgttgttggtggatgtggaactggtcagggcttcttaaatagtgtgttacagtttccggggattgtgtgtggactgatcgtggaaccgcttgatggatggctgttttcccagatcaatggaggaaactgtgtatcacttccgctgaacaagggatatggctgggcagcgaatgtgaatctggagtatacatttgagaagcttttcaaagatccggctggggcaggatatccgagagagagagctgagagtcaggggcagagccgtaaaaagctggcagagatctctaagatgacacacaaggacctgacacaaattctgttagatacagattcagagatcttgaaagcaattgccggaacagacagttttatggaagttttggaacatggcggagatggtgcgaaagatgtattagagtacttaaaacagtttagataatattttgctgtgttgctttgagctttgagtagaaatggaggaaagaatcagtatggataaatttatagaaaaattcagtctggaaggaaaaaaagcaattgtaacaggaggagcaaaaggtctatgcaatggaatggcacaagcgttgcatgatgcgggagcagaggtggttcttttggatattctggatattgtggaggattctgcgaaggaaatggcaaaggaaggagcaatggttcatgcagtaaaaggagatttgtcagacacggactcgttggaatctgtttataatcagtgtttagaaaaacttggaggacgtgtagatattcttctgaatggagccggaattcagtatcgtgcgcctgctgttgactttccacatgaccgctgggaaaaaatagtagcaattaatatgaatgcagtattctacttatcacaacttgcaggcaaaaccatgattgaacagaaatatggaaaaattatcaatatagcttcgatgacagcgttttttgcaagtgtccttattccggcatatagtgcaagtaagggtggcgttgcacagattaccaaagcattgtccaacgaatggtccagtcatggcgtgaatgtaaatgctattgcgcctggatatatggcaacagagcttacagctaatatgaaagaggtgaatccgaagcagtatgaggagattacaggaagaattcctatggggcgttggggaaatccagaagatctccagggacttgttgtatttctggcatctgatgcatcagcgtatatctcaggtgctgtaatcccagtagatggcggatttatgggtaaatagcagagaatttgcagaaacaggaaaacgaaaagaagacttttcaacaagaatatgaagaaagagattaatagataaatcggaagagaggatatgaacatgagactggaaaataaagtagcaattgttacaggagcaggaagaggacttggtcgtggaatcgcattgaagcttgcaacagaaggagcaaaggtggttgtagcagacatggcaccggcagatgagactgtggcactgattgaaaaatctggtggaatagcaagtgcatttactgtaaatgtttctagacaggaagaagtacaagcgatggtcaagtatgcgattgatacatatggaacattggacattatggttaataatgccggaattaaccgggacggaatgcttcacaagatgccagtagaaaactggcagcttgtaattgatgtagatttgacaggtgcgttctttggaacgcaggaagcgatcaagtacatgagacaaaaaggatacgggcgtgtgatcaacatctcttctggtagctggttgggaaatataggacaggcaaactatgcagcagcaaaagctggtgttgtaggacttacaaagactgcagcaagagaaaatgcaagaaaaggaatcacctgtaatgcaatttgtccgggatttattgagacagatatgaccttgaaattgaaagaagtaaatgacggagcagcctgggaaagtatgatgcagagaatcccgatgggctatgcaggaaaagcagcagatgttggcaatatggttgcatttcttgcatctgatgaagcttcttacattacatctgaagtgatcaatgtaggtggaggtatgattgtgtaaagaggtaagaatgaggtgatatacagttatggtaaaaggaaaagatgtgtggggaacgtggcttcagagagacatggaagaacgacaaatcgggaatcgtactgtttataccttctcaaaaatgaagaacagtttttacgaaatgttgtgtgatacagcaacaaaatatccggataagataggaattgtagacaactggaatcgtgagtatacatatcagaagttcttggaaatggttaaccaactggcagcttatatgaaacatatactgaaggtggaaaaaggaaatcatattggacttcttttaaataatggaattgagtttgccactgcaatttatgcagtgtgcaagcttggtgcagtggcagttccgcttcctacgaaatatcgtgaaccagagatacagtctcttgtgaaaaaagcagatttaaaatttatattcgttagtgaagattataaggtatggacatcattctatacagaatgtgggataaaagttatcctgaccgaaaatgagaaaacagaatatggatttacgtatctggcaatgcagaaagaaaaagaggaatctggagaaggagagctggaggatgaagtgattctgatgtttacgtcaggaactacgtcaactagtaagggagtcattttgaaaaattataacataaatcatgcagttatgatatatcagcgaatccttgaactcggagaagatgatcggacaatcattccagttccaatttatcatattactggtttagttgcacttctaggcttatttgtatatattggtggaacggtttatctgcataaaaggtatgatgcttataggattttaagtgctatacaagaacatgagataacatttttgcatggttcaccgactgtatttggacttcttttagaactgaaaaataaattttctaagaatgaaagtattcgtgtgttggcttgtggtagcagttatatgccggtagagacgatgatgaaattacatcaatggatgccacagatgacgtttcatcgaatatatggaatgacagaaacatcatctccggcaacaatttttccatctgatgcagctacaagtatttatgcaaaagcacagggaaaaccaataccaggtatggaactcaagattgttgatgattctggaaaagaagtgccatgtaaagaaattggaaatgtacagttaaagggtactaacatatgcgagtcttattatcatatagaaaaatcacctatcgataaagagggatggcttgatacaggggatatgggatatctgaatgaagactcttatctgtatattgttgacagaaagaaagatatgattaatcgtggtggtgaaaaaatatggtgcaatgatgttgaaaatgaaattacatcattaaaaggggtaaaagaatctgcactggtaggaattccaagtgaaaaatatggggaagtagcagcagctgttgttgtgttggaaaaagaaagcaagttaacagaagaagatatcaaacaaaaattacatgacagaattgcaaaatacatgatcccagaaaagatactgtttttagagaaaattccaaaaaccccaggattaaaaactgataaaagagcaatcagagcactgttttttccagaataaaaagtaaaggagcagagaggaacatgctgaaagcaaattttattacagcagatgaagctgcacgaaaagtgaaagacggagatactgtatgtagtattgcgatgacacttgtaagtgttagtgaatctattttgaaagcgttggaaaaacgttttttggaaagcggacatccctctaatcttaccttgcttcattcttgcggacagagtgatagaaaagatggaatccagcactttgcacatgaaggcatggtgacgagaattataggatctcattggggattacaaccacgttggatggatatgatagcaaaaaatcaggtagatgcatattgtctgccgcagggacaaattgcacaattatatcatagtatggcatgtggtcttccgggaaaaatggcaaaagtgggactgggcacatttattgatccacgtattgaaggtggaaagatgaatgagcgaaccaaaaggcttccagatattgttgatattattaaatacaaagatgaagagtatatgttttataatcagattccgattgatgtatgcattatacgaggtacggagtgcgatgagatgggaaatctgacaacaacagaagaagcaatgaagctagaagtacttccggctgttatggctgctaagcgatacgggggaagagtaattgcacaggtaaaacgtgtggttcagacaggaagcttaaacccaaaagaagtaacggttccaggagtttttattgatgatattgtggtctgcgaaaatcctttggaggaacatcgtcagacatcatcttggtattttgatccatcttattgtgggcaggcaagagtaccacaagaaaatattccagcagcgtcttttaatgaaagaaaatttattgcgcgtagaggtgcaatggaattgtatcatggagcagttgttaatcttggaacaggaattccaaatgatatggtaggaagagtctgcaatgaggaaggcatatcagatgacattatgattactgtagaatcaggaatctatggaggtgttcaggcaggaggcattgattttggaattggtcagaatctttatgcgatgattggacatcatgagcagatggattattacaatggggctggtgtggatattacatatatgggaattggtgaactaggagaggacggaagtgtcaattcaacaaaaatgggagttcgatgtacaggtgccggtggatttattgatattacacaaaatgctaagaaagtagttttccttggaacatttacagctggtggagcaaaatacaagtttgaaaatagaaaacttgaaattcttcaagaaggaaaaatacgaaaaatggtgcggcaggttgcacaattatcttttaatggaccaatggcgagaaaaaaaggacaggaagtcatggttgtaacagaacgtgcagtatttcaattggtaaaagatggtgttgagttgatagagattgccccgggaatcgatctacagacacagatacttgataaaatggattttaagccaattataagcaagaatctgcgcgtaatggacgaaagattatttgttcaggatggaccttttggacttaaattgaaagaaaaataaaagacttataagattgtgaaaatagaagaaggagaaaattcatgaaagatgtagtaattgtaagcggcgtgagacttccagttggaagttatggtggaagtttgaaagatatcacagcaatagacatgggagcaatggtggtaaaagaagcagttaaaagggcgggaatccagccatcagatgttgatgaggttgtaattggacaagttggagaagttgcagaaaatggatttattgcaagagcagtaagcttaaaggctggaatgccgaaagaaacaaccgcttattctgtaaaccgtcagtgtggctcagggcttcagtccattgcagaagctgtgatggagattcagacaggacaggcggacgttgttgttgctggtggtacagagaatatttcaagacttccgtattatgtaaacgatgcacgatggggagcaagaatgggtcacaaagtatttgaggatggagttattgacattcttacatggccgttggatggaaatcataatggtgtgacggcagaaaatgtagcaaaaaaatatcatgtaacaagagaagagcaggatgcgttcgcagtacgtagtcatcagagagcatgcaaagcaattaaagaaggcaagttcaaagatgagattcttccggtagaattgaaagatcgtaagggaaatgtaacgatttttgatacagatgagggaccaagagaaggacagagtatggaaaaacttgcaaaacttcgtccatgttttgtaaaaggaggtacagtaacagcggcaaattcttccagcttaaatgatggcgctgcagcagttgttgtaatgtctaaagaaaaagcagaagaacttggggtgacaccaaaagtaaagatagaaggatatgcaattgccggatttgatgcggaactaatgggatattcaccgaaaatctccagcgagaaacttgctgataaacttggattagatcttaaatccattgatatgtttgaaatcaatgaagcatttgcgagtcaggcgtatgcggtgagccgtgatcttggacttgatcctgaaaaggttaatatttatggtggcggaatctccatcggacatccaatcggagcaacaggcgcaatgcttactgtaaaagtaatgtatgagttaatgagaacagataaaaaagatgcaatgattagcatgtgtattggtggaggacagggaatctctatgtactttacaaaatgcgaagcataatttgatgtataaaaagtccgtctatgtattaattatcaatgttcatagacggacttttgaatttatagaaataataccatcctgaaagatgaaaatatcagaatggtaaaaaggaagttatctgatgaaatttgttgcaatgggttcctcacgttgaggaagtggaatgccgttggattttccagcttcaatacattttaaaagccaactcatgttaagagcaagtgtgcgcatggtttgaagtccttcgagatctttttctatgtctgttggtttcaagccgtgaacctgattccaatattgagatggaacaattggcatattacacattgcaaaatacatgttcatctgggagaaggcttcagaagcacctcctctgcgacaggaaacaactgcggcagctggtttgttttcaagataagaacttccactgaagaaaagacgatccataaaagaagaaagagaaccagtggaagatccataataaacagcggatccaaatacgaatccatcagtatcctttgctttttctaaaaatatctttaaaatatcatcaaatacacaggttccgctttcttgacattgacagcatccgatacatccttggacagtgcttccaatccaaaaaatttcagaatcaattgcttctttttttaattgcatctgaatttcttgtaaagcacggtgtgtacagccatttttatgtggggatccatttactaataatactttcatgttattgagcctccttgcttaaagcataatattgaacgatctgccttacattataaacgtagcaaaggagtatggaataatcaagaaagaaaaactattagttgcataatgcgcaacaataaattaaaagattgaaagaaacagtaagagaatttcaatcttttaatatgtaatcaaatcaaattcagatattccagcgcctggcggattccgccgtcttccaaggcgccggtcacataatcagcctgtgatttcaagtctttagatccatttcccatagcaaccttaaatccggcagcctggaacattggcaagtcattattgctatcgccgaaagcaataacatccctcttttcgtatccaagtacattactcataacactgatcgcaagtcctttggaacagcctttcatgacaaattcaatcgttcttccaacaaaagatccactgtgaataatataatcataccatagggataattcctggcataatttctctggattacatccgggtgtgcgcttggcacttattttgttaaagtgaagattatgttcatttccacgaataggaagcagtttgttaccgagttcctgagtgatcagatcagcaaaccagtctatgtcacttgtatattcatccagattatagtacatataatcattgccttccagtacagggataaaaccgtttgccttaatgatctctacggtcttccatgccaggtcggttggcatctcacgctcaaatacccgcgttccattatattcgatatatgctccaagattagcgataagtccgtcaaatccaatctccttcataagatattcaggaacaaaagcgtttgaacgaccggtacagatgaaagtcttatgtccgttttttctcaactgttgaagtgcaagttttgtatcttctggtgttccttttacaatatctaaaattgttccatctgcatcaaagaaaagacattttcccattgtaagtattccttctatattatagtattatctctcacctaaaaatcccataaacttacgtacagagtaattcaggataagatcctccggaatgtcagcttttcgagccaaagcttcggcatactggaagtcaccgatatgttcggtgccgtggctgtcactggagaatagaaccggataattaaagtgcttggacagattcaatattaagagatcagcataggtcgtatccccacgatatccatctggacttaaagaactgttattgatctcaagcagaacatggttctccattgcagcacggaaaagcgcaaaataatctaccgggaatttttcgtcatcgcaatgaccgatgatattaacattaggattctccatagtcttgatataagcacgggtgttctcatctgctgttccggatttgaaaattggacgatgcatacttgctataacataatccagagactctaaaatctcatcatcaagatccagttttccttcttgatccagaatatttacctctgcaccgtaaagcattctaacaccgagacgctttggttgtgcaaatgcaaggctgcggaaataagaaatgcgtccgccaccaagcgttttcggaccatgatcggaaattccaagcatcttaagcccggctgcattggcagcttttgccatatcagtcatggttgcacaggttccgtgcccgctggcgatggaatgtgtgtggatatcaaattcataagaagccatataatccaacccttctttctaatcgttcgcgcgagagacacagtgtcgattaacgtgtcatgtcgcatatataccctaattatgcggtattttgagtaaaatgtcaattaattcgaggtaaaatacagagaaaaaacaaataaaacacaacacaaaccatgttgggatttgttgtaactttagagaaatataatgtgggatgtattgtgttttgattgactttaagggataaataaagtataataaatgttaatattggaagaaaggagtttaagaacaaaatgggactttatacttatgacagtactcccatcccgaagtcggacagaattccaaaactggtagaaaacctgtatgcgaagatgcctgagattgagtcggcgagagcagtactgattacggagtcgtacaaacagactgagaatgaaccaatgatcatccgtagagcaaaagcgttccagcatattttggagaatattccgatcacaatccgtgacctggaacttgttgttggaagcagcacacttgccccaagaggatgccagacatttccggagttctcttacgagtggttggaggcagagtttgatacagttgaaacaagaagtgctgacccgttctacatctctgagcagacgaagaaggaactgaaagaggcgaatgcttactggaagggccgtacaacaagtgacctggctacagcatatatggagccggagacattacttgacattgaacacaatatctttacacctggaaactatttttacaatggtgtaggacatgtgacagttaagtacggtgaagttctcgagatcggattttccggaatccgcaagaaagcagaagatgagcttgcttctatgaaggttagtgatggtaactaccagacaaaatcacgtttccttgaggcagtgatgatcagctgtgatgctgcaattacatatgcccgtcgttatgcaaagcttgcacttgagatggcggagaaatgttctgatccggtaagaaagaaagaacttcttatcattgcacagaattgtgcgaatgtaccggagaagggtgcgacaggattctatgaagcatgtcagtccttctggtttgtacagcagctgttacagattgagtccagtggacattcaatatcccctggaagatttgatcagtatatgtatccttattataagaaggatctcgacagcggcaagatcacaagagagtttgcacaggaactgctggattgtatctgggttaaattaaatgacctgaacaagtgtcgtgatgcggcttcagcagaaggattcgcaggttacagtctgttccagaacctgattgcaggaggacagaatgaagatggtatagatgttacgaatgatctttcatttatgtgtattacatcatctatgcatgtattccttccaatgccttctctttcagtaagagtttggaatggatcaccacatgaattcttgatttatgcagcagaacttacaagaacaggaatcggactcccggcttattataatgatgaggttattatcccgtcacttgagagccgtggactgactttacaggatgcgagagactacaacatcatcggatgtgtagaaccacagaagtctggtaagacaaatggatggcatgatgcagcattcttcaatatgtgtcgtccgctggaactggtattttcaaatggtgtggacaagggtgtacagattggtccaaagacaggtaatgttgaggatatgaagacatttgatgaattctatgatgcttataaagcacagatggattacgcgatcgcactgcttgttaatgctgacaatgccattgatatggcacatgcggagagagcaccgttgccgtttcttgcatgtatggttgatgactgtatcaagagaggaaagacactggaacagggaggcgctgtatataactttacaggtccgcagggattcggtgttgccaatatggcagatgcactttacgcagtaaagaaactcgtttatgacgagaataagatcacgatgcatgatctgaagatggctcttagcacaaactatggaaagggcctgagcaacgaggatgttgcagaaatggtatcagaggttgcttctgcaatgaaatctgccggacagccggtaggtgagaaagaagttgcagcaatcctgaaaactgttgttgcagcaacagaatcagaacaggtgaaggcaaacggcgagagaatcctcaagctgatcgatgcagtgccgaagttcggaaatgatattccggaagttgacgcatttgcaagagatgttgcctatacttatacaaaaccactggagaaatataaaaacccgcgtggaggtatgttccaggcaggattgtatccggtatcagcaaatgtaccgcttggcggacagacaggagctacaccggatggacgtctggcacacatgcctgtagccgatggagtatctccaacagcaggtaaggatgtaagcggaccgacagcagctgcaaactccgtttccagattagaccactatattgcttcaaatggaacactgttcaatcagaagttccatccgtcagcactgagtggaagagaaggacttgagaagtttgtaggactgattcagtcatacttcgatcagaagggaagccacatgcagtttaacgttgtcagccgtgatacacttttggatgcacagaagcatccggagcagtataaacatctggttgtacgtgtagctggatacagcgcactgtttacgacattgtccaagtcactgcaggatgatatcatccgcagaacagagcagggattttaagaataagaaggagacagcatggaagaatatctgaagaccaaaggaagaatcttcgatatccagcggtattccatccatgatgggaatggaattcgaaccattgtgttcctaaagggctgtgtgctcagatgccgctggtgctgtaatccggaatcacagcactacgagatcgagacaatgatggtacagggagaaccaaaagtgatcggtgaggacactacggttgctgaagtaatgaagacggtagaaaaagatcgtacttattatagaagaaccggaggcggacttacactttccggaggcgaaagcctttgccagccgaagttcgcaagagaccttctgcgggcggcgaaagagtcaggaatcacaactgcgatggaaagtatgggatgcgcaccatacagcacaatcgaagagattcttccatatttagaccagtatctgctggatatcaaacacatgaatccagagaaacataaagaatttacaggacgctcgaatgaactgatgttagagaatgcaaagaagattgcagactctcatatgacagagttgagcatccgtgttccggtaatcccgggattcaatgatacagagatagaaatccgtgatattgccgcatatgtccgcaaacttggcaatgtaagaagaatgcatcttctgccttaccacaggctgggacaggataaatatgacggactgaaccgcccatacctgatgggggatgtaaaaccaccgacaaatgaaaagatggaacgacttctgaaagtagcagaagaagtttccggtgtagagtgccggatcggtggttaaaaataaaaaacacaatcagataatctgcacgaagtcgaaaacagagaaaatagtgaaaataatcacaagaaacaacaaaaacaacggctgttcaaattgactaatgtgggattgtgtggtaaaataagttaagaaacaacacaaaacaaaagttttgacacgattccaaggaggagaaaaaatgcaaaacgaatacgaaatcaaaaaagaaatgtgtgaaatcggaagaagagtttacaaccgtggaatggttgcagctaatgacggaaacttttctgtaaaactgaacgaccatgagttcctgtgtacaccaacaggtgtcagcaaaggattcatgacgccagagtacatctgtaaagtagatgagaatggtaatgttcttcaggcaaataaaggattcagaccatcttcagaaattaagatgcacatgcgtgtgtacagagagagaccagacgttcagtctgtagtacatgctcatccactgtacgctacaacattcgctatcgctggtattccgcttacacagccaatcatgccagaagcagttatcgctcttggatgtgttccgatcgctaaatacggtacaccttctacaatggagattccggacgctatcgagccataccttcagcactttgatgcagttcttcttgagaaccacggagcacttgcttactcagacagccttctgagcgcataccacaagatggagtctcttgagttctacgcacgtctgttatggcagtccatgcaggttggcggacctcaggaactgaacgatgagcaggttcagagactgtacgaactgagaagacagatgggacttccaggaaaacacccggcaaacctttgcccgaacgctaaagctggtaagccaagctgccattcatgcggtggaaactgtggcggatcttcagcagcagctccagaaggaacagatgctgatcttgtagcttctatcacaaagaaagttatggaacagctgggaatgtaatctgacagattagtaaaggagcaatgctatgaatgagcaggaaattaccagtgcagttcaggctgtgctggatcagatgaaggaagcagctccacaacatacacacaaacatgtctgtaaatgcaaaaagcatcagatgacattgaagcttgccaatgccttgattgaaaaagttaaggcagaagcggcacgtgtgggcgtgaatgcggttgtagcagtttccgacaaggcaggcagacctgtagccgtccagtgtatggatgacgcctacatagcaagctttgacattgcattgaacaagacatatacttccgcgagccttaagatgtccacagcagagttaagtcagttgagtcagccgggacagccgttatacggaattcagtttacgaatgacggtaagatcgtgatcttcgggggtggagaggtactcgaagctgatggcaagatcgtcggtgcactcggagtcagcggtggaactgctgagcaggacacagcaatcgcagcttacggaaaacaagtcttcaaggaggtattagagtgtctataaatgaacagatggttcaggacatcgtacaggacgttcttgcaaagatgcagatcgcttctgatgtacagggagaccgcggtgtattcaaggatatgaacgaggccattgaggcagcgaaagcgtcccagaagatcgtggctaagatgtcactggatcacagagagaaagttatctccaacatccgtaaaaagatcaaggagaatgcagaaatcctggcccgcatgggagttcaggagactggcatgggaaatgtcggacataaaattttaaaacaccagcttgtagctgagaagactccgggaacagaggatatcactacacaggcatggtcaggagacagaggtcttacattgatcgagatgggaccgttcggagtaatcggagcgatcacaccttgtacaaacccaagtgagacagttctctgtaacacaatcggaatgttcgcaggtggaaatacagtagtatttaacccacatccggcagcaatcaaaacatcaatctacgcagttaatcttctgaacgaagcatctgttgaggttggtggaccggacaacattgcttgtacagtagagcatccgacacttgagacaagtaacatcatgatgaaacatcctgcaattcagctgatcgctgcaacaggaggtccgggagttgttacagcagttctttcttcaggaagaagaggaatcggagctggagcaggtaacccaccggcactcgttgatgagacagcagatatccgtaaggcagctgaggacattgtaaacggatgtacatttgataacaaccttccgtgtatcgcagaaaaagagattgttgcagttgattctatcgttgatgaactgatgcactacatggtaaatgagcagggatgctacctggcttccaaggaagagcaggatgcactgacaaatgtagttcttgcaggcggaaagctgaacagaaaatgtgttggacgtgatgcaaagacactgcttggaatgatcggagttacagttccggacaatatcagatgtattacatttgaaggaccaaaggaacacccactgatcgcaacagagcttatgatgccaattcttggtgtagtaagagcgaaagatttcgacgatgctgtagagcaggctgtatggcttgagcatggtaacagacattccgctcacattcattccaagaatgtagatcgtattacaaaatatgcaaaagcaattgacacagcaattcttgttaagaacggaccatcctatgcggcacttggattcggaggcgaaggcttctgtacatttacaattgccagcagaactggtgaaggacttacaagcgcaagcagcttcacaaagagaagacgttgcgtaatgacagacagcttatgtataagataacggaggtatagacaatggaaatgaattctgctaatgtagaagctgttgtaaaacaggtacttgagagcatgctggaaaagaaagttccagaagcagctccggcacagaaagcagcaggaaatgaaattccaaagacagctcatgtagctatgcttacagcacttgagcattttgaaatcaaagagtatccgatgccggaagttggtgacggagatattcttgttaaagttgaaggatgtggtgtttgtggaacagacgctcacgaattcaagagagacccattcagccttatccctgtagtactcggacacgagggaacaggtgagatcgttaagatgggtaaaaacgttaaagttgacagcgctggaaaggctctgaatgttggagacaaagttgttacatgtatgatcttcaaggatgacccggagatcacaatgtacgacctcaacaaacagaacgtaggtggagctgatgtatacggacttcttccggacgatgatgttcatctgaatggatggttctcagattacatcctgatccgtgagggatctacagtattcaacgtaagtgatctggatctgaaatcccgtgtactgatcgagccatgtgcagtacttgtacatgcagtagaaagagctaagacaacaggaatcttaagattcaacagcagagttgttgttcagggatgtggaccgatcggactgatctgtatcgcagttcttcgtacaatgggtatcgagaatatcgtagctgtagacggagagcagaagagacttgactttgctaagagaatgggagctgagaagtcagttaacttcaaagatttccagggaatcgatgcacttgcacagggagtgaaagacgcattcggcggacatgctgctgacttcgcattccagtgtacaggatcaccggtcgctcatgcaaatatttacaaattcatccgcaacggcggtggactttgtgaacttggattcttcatcaacggtggagatgcaacaatcaacccacacttcgatctttgctcaaaagaaattacactggttggctcatgggtatacactctgagagattacgcaactacatttgatttccttaagagagcaaaagcaatcggacttccgatagatgacctgatcacacatgagttcccacttgagcagatcaatgaagctcatgagacaaacctcgctatgaaaggtcttaagatcgcaatcatcaataaataaggtgagagattatggaagcagtaggtatgctggaagtattcggacttgcaacagcatttgcagcggctgatgccggatgtaaagcaggaaatgtaagactggagaacttcgataaaaataaacctgcaaatgcagacgaactgcctgtaccgttgatcgtaatgatcaagttccgcggtcaggtagcagatgtggaggcagcacttgaggctgctacagcgaaagcagagtcaatgacaggaattgtcacaaagtataagatctcaagaccgactgaggacactgagaagatgcttaagcttaacgcatttgataaaggaacaccacacaaagtaacagacgaagaagtcgaagaaatttaggaggatattacaatggcaatggcacagcttgcattaggaatggtagaaacaagaggacttacagcagcaatcgaggctgcagatgcaatgacaaaagcagcagaggttacacttgtaggaacagagaagatcggatccggacttgtaacagttatggttcgtggagatgttggagctgttaaagcagcagttgagacaggtgctgacgcagctggaagacttggagaactcgtagctacacacgtaatcccaagaccacacaacgacgttgagaagatccttcctacagtatagtttgaagtcaaacagctagaaaaggagcagtctcatgggaaaagcgtatggattctttgaaatcccaagcgttacggcagcagtggtagccgtggatatcatgtgcaagactgctgatgtgcagttcgttacatgggagaaaaaactgggtggaagacttgtcacgatcataattcgtggtgatgtatccgcagttgcgcaggccattgaagctgccgagcagaatggaatcaaaaaaccagtgagcacagtagtgatcccaagtcctcacgaggagatcttgagaatcattaacacaagtgtaaacaaggttgtataggaggcagctacagatggcagacgaaaaagaaaagaaaacaacaacagccaaagcgccagccaaaactgtacgcagagtaaaaaagacggcgcaaaaggtagaaacggttcagaagaaaccggaagttcagaaggaggaacgcagaatgtcacaggaagcattaggaatggttgaaacaagaggacttgtagcatctatcgaggcagcagattcaatgttaaaggctgctaacgtagcactcgttggaacagagaagatcggatccggtcttgtaacagttatggttcgtggagacgttggagcagttaaatcagcagttgagtctggagcagagtcagcaggaagacttggagagcttgtagctacacatgtaatcccaagaccacatacagatgttgagaagattcttccacagatcaaataatagtcaaaggtaaataaaaccggtactttcaggggattaagcgccgggcgctaatcccctgagagtgcttaaataagtaagtggagcaatccactttgcgaggagacacaaatatggataacagtaatgtggaattaattacaaaaatggttctcgaagcagtagagaaaaagaatgctgctcagtctggagaaggttttctcgttccaatcggagtgtccgcaagacatatccatctcacacaggagcatgtcgagattctgtttggagaaggctaccatcttacaaagttcaaagaacttatgggtggacagtttgcatcaaacgaaaaggttacaattgttggtcttaaattaagagcaatcgagaatgtaagagttcttggaccagtcagaaagaatactcaggtagagatttctgcaacagatgcaatcagcctcggtgtaaaagcaccaatcagagaatcaggaaatattgcaggaagcgcaccaatcgcgatcatcggaccaaaaggtgcggtgtatctgaacgagggatgcattgttgcgaagagacatattcacatggctccgaaagatgcgatggcagcaggagttcatgatggtgatatcgtatctgtaaaagcagataatgagagaggaaccatctttaacaacgtacagatccgtgtagatgacagctttacacttgagatgcacatcgatacagatgaagcaaatgcagcgcagattaagagcggggataccgtgaggatcgtatcatgttaatgggaaaagttgttggcagtgttgtatcaacacgcaagaatgaaaacttagtcggaaataaattcatgattgtagaagtggcagatcatatgcgtcagggagcaaaacagatcatcgcaatcgataagatcggcgcaggaatcggcgaatacgttctggttgtacagggaagtgctgcgagaatcggaagtggtatgccggaagcaccgatcgatgctgcaatcgttggaattattgacgaaggattaggactggagtagtgaaattatggatatgaaagaattaagcagcatattgcagcagaacggtatcgttggtgctggtggtgcaggctttcctacatatgctaaattagatgaacgtgcagagacaatcattctgaactgtgcagagtgtgagccactgcttcgacttcacagacagctccttgagaaatatgcaaaggagatcattgatacatttcatatgatcggcgagacagtcggtgcgaaagaagtcatcattggtattaagaaagcttacacagcaacgatcgaagctgtaaaggccgttatgggacagtatccggaagtaagacttggactgttggatgaagtatatccggcaggtgatgaggttgttcttatttatgagacaacaggtaaagttgtaaggccgggtggacttccaatcgaaagcggagtagctgtattcaacgtagagacagtttacaatgtatacagagcactgaatgagaagacacctgttgaggacaagcttgtatcagtagtagctgaggtagagcacccaatcacagttcgtgttccaatcggaacaccactggaagaggtagtagctcttgccggcggtgtaactacaaaagatgcagtttacttcgttggtggacctatgatgggtaatatcggaacaggagcgcagcctgttacaaagacaacaaatgcaatccttgttcttccgaaagaccatcacatcattcagaagaaattaaagaaaaactcaatcgatatgaagagagcagcagcttgctgttgccagtgtacaatgtgtacagacttatgtccaagacatctgttaggacatccgattgagccaaataaatttatgcttgcagcaacatgcaaggatgtacaggagccgaacatcttcatcaatacgttgttctgctcatcctgcggactttgtgagatgtattcctgtttccagggactttcaccaagaagtcttatggcagagtacaagggagggcttcgtgcaaacggaatccgtcctccgaaagtagaagcaaaacctgtaggaccggaaagagaatacagaaaagttccgatggagagacttatggcgcgtcttgatcttacgagatataaccgtgaagcaccgcttgatgaatcagcagtgccggttaagacagtacgtattctgttaagtcagcatattggagcacctgcttctgcaattgtgaaagcaggcgacatggtaactaaaggacagatgattgctgaaccaggaaagggattaagcgttggaatccacgcatccgtgaatggtttagttacagaagtaaatgagaaatatattgtcatagaatctcaggaaggacgtgcaggcaatgagtaaggctattggaatggtagaatataagactgtttcagcaggtattaccgcagctgatgctatggtaaagacttctgaagtcagcataatcgaagcacagacagtatgtccgggcaaatatatcgcgatcattacaggtgacttaagtgccgttaaagcagcagtggataatgcaaaagagatgcatggtcttcacctgatcgacagttttgtgctcggtaatccgcacgagtccatcttcccggcaatctacggtgctgcacatattgaagacgtatccgctcttggtattatggagacatacgatgcatcttcaattattgtagctgctgatgaggctgcgaagacggctatcgttgatctgatcgagcttcgtatcgcacgtggtatgtgcggaaaatcctacatgctgctcactggtgaagtggctgctgtagaagctgcaatcgaaaaagctaaggaagcaatcaaagatagaggaatgttccttgactcttccgttattgctcatccggatgctcagattcgcgacgcaatcttataatgaactctgctttaatgtctgagggagttatagttcaataccagtaacattatattggacttaggacaggaggcagttagatgcttgcgatagagagaagaaatgaaatactagaaaaactgcagaatgacagacgagttgtagtaagtgaattaagccagatttatgaggtctctgaggaaacgatccgaagagacctcgataaactggttcaagacggtttcgctataaagagctatggcggtgccgtaattaatgaaaatgtgaatatcgaacttccgttcaacatcagaaagaatcgcaatattgttggtaaacagcatattgcggaactggtgagtgaacagatcaaagatggggacagcatcatgcttgatgcaagttctacagcagtgtatgttgcaaagacgcttctcgaacaaggaaagaagaatcttaccgtgctcacaaactctgtggagattatcatagagctttttggggcgcaggattggaaggttctctctaccggaggagagtcaagagaaggatcctttgcactggtaggttatcagacagaccggatgcttcgatcttatcatgtagataaggcaattatctctgcaaagggaatcgatatgaacgctggacttacagattcagatgatctgcatgcgaataataagcgaacaatgctgacaagagcaaaagaaaaaattcttgctgtagacagcagtaagttcgatcaagtagcatttgctgagataggttcattagatcagatcacaactatagttacggatgcaaagccggaaacaagatggcttcagcattttgataagattggtgtaaaatgtatctatccaaagtaaggaagggcagttatgaaaagctttcagattaaaactagagtaaattttggagataatgcgctggatcgactggcagaagtgccatataagaagatcctgatcgttacagacccatttatggcgaaaagcaaaaatctgaacctgattctcgatccaatcaaaaaagcaggtaaggaatatgatatctttcaggatattgttccggatccaccgattgagaagatcagtctcggtgttaagaagatgcttgaatataagccggatgcaattgttgcagttggtggcggatcagcaattgactcctccaagtcaatccgtgaatttgcacttcgcgtagatcattacgcagaggtagggctgatcgcaatcccgacaacaagcggtacaggatcagaggtaacttcatttgccgttgtatcagacccggcagagcagagaaaatatccacttgtatcctgggaattgacaccggacgaggcaatcctcgatgcagaacttgtaaagagtgtgccagcggcgattacagcagatacaggaatggacgtatttacacacgcacttgaggcatgcgtaagtacagatagaagtgatttctcaacagcacttgcagagaaatcaattgagttggttggagtattccttctcagagcatatctggatggaaatgatactcatgcacgtcagaagatgcattctgcatcctgtctggcaggattggcattcaactcagcatctcttggactgaaccatggtatggctcatcagttaggtgcaaagttccacatcccacacggacgtgcgaacgcaatgcttcttccacatatcattgaattcaacagtgatatcaataagcatagcaagagccagaaagaatatcttccggctgttaagcgttatgcaacagtagctcagatccttggactgagcagctacaatgagatcatgacagtaagatcccttgtaaactgggtacagtttatgttaaaagagatggatattccgctgtcaatctctcagatgggtacaatctcagaagaagagtacttcaatgcaatcgacagtatggcagatgccgcacttgaagatggatgtacagcaacaaacccgagagtaccaaataaggaagatgttattgaaatctacaagaaattgtggaaataataagcataaaaaagaagctgcgatgtgtacagcttctttttttatgcttatttatggcaaaattgccggaattcttatctgaacttccgtaccttctccttttgcactggaaaaacttagtccatagcgctcaccgtataaaatctgtaatctgcgatgtgtattataaacagcggaacaaaacattgtatggcacttgtgttgtatttgttccacgaaaatgatataatttacattggaggtactgtttatggataaagaaaacaaagcctattcaatgagtattcgagtgtcgaaagatgaacttgaaaaattgaaacaggcagcacgtatagaagcgtattcatcttatagtgagtttgtaagaaggacggctcttttagaagcatcccatattcttgcatctcagaatagcaaagaaaataataatgaaggagaataacaatgcctagaatcattgatttatttgcaggcttaggaggaatacgtttgggatttcaagaggctatggatgttctcggattagaaacagaatgtgttttttcttctgaaattaagcaatatgcaattaaggcttataaagatttttatggtaaggacgaagttgtaaatggagatattactcaaattgatgtagttgacatccctgattttgatgttctcctcgcaggcttcccatgccaaccatttagctcggccggagtcagaaaaggatttaaagatactagaggaacaatgttttttgaaattgaaaggattctcaaagggaagatcgaatcaggacatcctgccatgggatttcttttagaaaacgttgaaggattaatcaaccatgatggtggagataccttgaaaataatcattgatcatttggaagcattaggttataaggtttcatataaattattagattcgaaatttttcggattaccacagagtagaaaaagagtgtatattgtcggaacactcacagataaggtgagccttgatgattttgatgaaagtatcaagacgttggatagtgttttggaacaaggattaccaacagttgattcagacttcacaagaaaactctttacttattacactcctgaagaagtaaagggtaagtccattaaagataaacgaggtggaaaaaataatatccattcatgggatattgatttaaaaggagttacaacaccagaagaaaaagaattcttgagccttttattgaaagaaagaagaaaaaagcattgggctgaggaaattggaataacttggatggatggaatgccattgactgaagagcaaattagaaccttttacgatgtcccagagctgcatgagatgttgaatcaccttcatgaaatgggatatttggcatttgagcatcctaaaaagcagattgaaaaagacggcacaaaagtaagagtccctgatacagatttacctaaaggatataatattgttgcaggaaaattatcctttgagttttcaaagattttaagtcctgatgagatggcacctacattggttgctatggatgtttctaaattaggtgtagttgatggaaatggaattcgcagattatccattagagaatgtcaacgattgtgtggttatccagacgaatactcacttgatcaattaagtgaaggagatgcatttgatttacttggaaatactgtatgtgttcctgttattaaagaaatttccttacgattaggagaaatatatcaaaaacaaagatagggggaaggaaaatgcgattgacggcacagcaagtgtacgataagctgattaatgaagatgctattttaaccttagaaggtcaaattaaattctttttaggcgaagtcagtattattgtaaaacaaaaagatgttgttggtaatattatgcaggagtggttgcaaggttggatggatcataacgggattgaatatgctcctgacactaattctcagatgccaccagacttttatttgaacccagatgataaaacacagaatttgttggaagtgaaagctttcaatcgttcgaatagtccgggtttcgatattgcagactttagaatgtatgcatcggaaattttagaaaagccatatatgttggatgtagattatctgattttcggatatgatatgagcgaagatggtgttgttacaattaaggatgtttggttgaaaaaagtatgggaaattactaggagaatggaaaactatcctatcaatctccaggtaaaagatggagtaatccataagattcgcccaggtgtttggtactctgataactcaaccgattataaaatgtttgaatcattggaagattttatctctgctattgaagaaacaacatttaaggagcctaagttaagggatagtattgcctcaacatggctgacaaagtttaacaaagcatataaagctcgttatggtaaagaattaaatgttcctagatggaacgatattaaagataaatatgatgttggaaccgttagaagatatgaaaaagcggaagctacattaaaaaaatcagaagcagctttgaaaaaatgcgaagatagagttttgatgtgggcacagaagctgtctgaagcgaaaacagataaacaaaaaataaaagccgaggaaagccttaaaaaagcaaatgtttctttggaaagtgcaaaagacagagtaaaggaagcaaagaatagactcgaagcatatgctcagatgcttggttaaagaggtgatatttgggagcatgagcgtaatcaaaaccataatagaaaagatgaaactcaaagaaatctgtgcagtattatttattgcagggattataattacatatatgccacaagactatgctatgaaatttagcattgtggaatttcgtgaaacttatcaaacttatatcagtgtcgggctcataatcattgccgccttctatatttttagttttattacatgggtcagtgagaagatatttttcaaattccataatccggaaaaaataggaaagaattatttgaaaaatgtaatgtcagccgatgagatggggtttttagtcgaaaaattttacgatcgagaaagtaatgtttttcgaaataccgcctatatcgatatgagtgatgggcgaggagctggattaacaagtaaacatgttatctatctctcttcgaatattagtaattggaattcctttgcatataatttgcaaccatgggcatacaaattccttaataaaaatttgaaagaaggaaatattgttgtaagtggttctagtgtacaatttcaacttaaatgattaagccaagcagcagtcatccgcctcctcttgcatttgatttgcaagagccttgctgcgggacaagagagtgtcgatacttgatgcttcaagtggcattacatatccaccacgtatagatttctccttggatggagatgaatgccggtatccagcctcgccgagatcgtctgcaacttcaaaatatcatgtgtaagagaatgttcttctgtagccggtaaagctacggaagaatgttctctttttatagtatattaattgagtgttatctgaaagaattgttgtatatactatatcaaatacctgagaaatggacaggaagcgtgaaatgagattacctatttatatagaagcagcaatgggagtttttctggtagtgattctggcaatggcaggaagaaacggaatgattcctcagaaccagaaaaataatgttatgaaacagtcagaagtagaacagaaatcagattctgacatacaaaacgaaaaggaaggagttgcggaagaggcaacagattcgatagaagaagttgcacagactgacagcgtagcaataacagcacagatgtgttctccggccgggcagtatccggttatgggggagagtgttgttacggtggatgagcttgcagattatttcaatcaatcgggatacgaatatccgtcggaagaactggcaaaaggtggagcagataccatagaaacattctgccagatctactgtgaagaagcagaggcagaagacatccgggcagaggttgcatttacccaggcaatgaaagagactggatttcttcagtttggcggtgatgtaagtattgaacagttcaattttgccggaataggaacaaccgggggaggagtgccgggaaattcttatccggatgtcagaacaggagtgcgggcacagatacagcatctgaaggcctatgcgacagatgaaccgctgaatcagacttgcgtggataaccgttatgaatatgtgaaaaaagcttccgcaccttatgtacaatggctgggacagaaagagaacccggaaggagccggttgggcgacaggagagaactacgggtatgatattgcagggatgttgcaacatttacttctaaaagagcaaggttaagaagatatggctggacttccggctgtggttatgatattttaagatttcttaaagaaagggaaatcccttgacaaatcagcctttgacagctatagtagtaacagttaaaaagtatttaacaactatgtaaagatacaggtgttgaagaagaggagtacatcattacttcccacagagagaaccgttcagattgctaagaggatctggctgtgagacggtttggaaaaaggatgatggaaggtagcttcggagtcggaattctgaaaggtcgaagaggttggataggagttcccggagtcgttcacgttacagaacgaagagatgtatatgtaaagaacaaggttaatacaaacagtaataagttcttacatatataaataaggtggtaccgcgagattttcgccctttacgtgaagtagagggcgttttctagttatagaagaaagagatatccacttttaaaacaatgagattgtggaaaacaactacaaaattaacataatatgtggaaaaaggagaacaatcatgagcaaagaactcgcaaagacttacgatccgaaacagatcgaagagaaactctatgagagatggtgtgagaacaagtattttcatgctgaagtagacagaagtaagaaaccatttacaacagtaatgccgcctccgaatattacaggaaagctgcatatgggacatgcacttgacaatacactgcaggatattctgatccgttacaagagaatggaaggatataacgcactgtggatcccgggaacagaccatgcagcaatctctacagaggttaaggttacaaatcagctcaaagaagagggaatcgacaagaaagagctcggacgagagggatttcttgagagaacatggcagtggaaagaagagtacgcaggaacaatcgagaatcagctgaagaagcttggtatctcctgtgattgggacagagagcgtttcacaatggacgagggatgttccaaagctgtagaagaagtattcatcaacttatacaacaaggggtatatttacaaaggttccagaatcatcaactggtgtccgaaatgtaagacatctctgtcagacgcagaggtagagcatgaggatcaggacggaaacttctggcacatcaagtatccgatcgccggaacagaccgtttccttgagatcgcaacaacacgtccggagacactgctcggagatacagcaatcgccgttcacccggatgatgagagatacaaagatatcgtaggaaagatggcaatccttccgcttgtaaatcgtgagattccgatcgttgcagactattatgtagacaaagaattcggaacaggtgctgttaagatcacaccggcacatgacccgaatgacttcgaggtaggaaagcgtcacaaccttccggaaatcaatatcatgaacgatgatgcaacaattaacgagaagggcggaaaatacgcaggaatggatcgttacgaggccagaaaggcaatcgtagcagatctggatgagcagggataccttgtaaaggttgttccgcacatgcatgcagtaggaactcatgaccgttgtggtacaacagttgagccgttgatcaaacagcagtggttcgtaaagatggaagaacttgcaaaaccggcgatcaatgcactgaagaccggcgagcttcgtttcgtgccggagcgttttgacaagatttatcttcactggcttgagaacatcaaagactggtgtatctcccgtcagatctggtggggacacagaatcccggcttattactgtgatgagtgcggtgaattcgtagttgcaaaagaagcaccggagaaatgcccacactgtggatgtacacatttcacacaggatgaagatacacttgatacatggttctcttcagcattgtggccgttctccacacttggatggccggagaagacagaagaccttgactacttctatccgacagacgttcttgtaactggatatgatatcatcttcttctgggtaatccgtatggtattctcaggatatgagcatacaggaaaagctccgtttaacacagtactgatccacggtcttgtaagagactctcagggacgtaagatgagtaagtctcttggaaatggtatcgatccgcttgagatcatcgacaagtacggtgcagatgccctgagactgacactgatcacaggaaatgcacctggtaacgatatgcgtttttacaacgagcgtgttgaggcaagccgtaactttgcaaacaaagtatggaatgcatcaagatttatcatgatgaacatggagaagaacgttgtagaagaaccggaagacttcctgctgaaaccagcagacagatggatcctttccaaggtaaacagcctgacaaaagaaatgacagagaacatggataagttcgaactcggtatcgcagttcaaaaagttcatgactttatctgggatgagttctgtgactggtatgtagagatcgcaaaatatcgtatctaccatgcggaggaagattcacagtccgcaaactgtgctctgtgggtacttaagacagtacttggacaggcactgaagcttcttcatccatttatgccatttatcacagaagagatttatggagcacttgtaccggaggaagagtcactgatgatgtcaagctggccggtatacagagaggattgggagttcccatatgctgcagaagttatggaacatgtaaaagcaatcacacgcggaatcagaaatatgcgtgctgagatgaatgttccgaataacaaacgtacaaaggtttatattatcagcagtgattcaaaactgcttacagcacttgaagtattcaaggaatctgtaaaaccgttgatgctggcaaacgatattattcttcactatgagaagaaagatgttgctgatgatgcagtatctatcgttgttccgggagcaacagtttacctgccgctggaagaccttgtagacttcgagcaggagagagaaagactgaagaaagaggaagagagactcaacagcgagatcaagagagcacagggaatgcttgcaaatgaaagattcacaagcaaagcacctgcagataaagttcaggctgagcgtgataaacttgagaaatacacacagatgcttgagcaggtaaaagagagaatcgatagtctcagataactgtggggggagaaaagctgcaaaaaagcaggaaactgtaaatagcagtttagacacagtatcaggtattagacggcaaaaagtcgcacggcagaagggatgtaaaatcccgggccgtgcattttgcctataagaaagaggttatagatgaagcggattcatattaaaaaaccagatgtcaaaggattttttacaaaggt
